(19) United States
(12) Patent Application Publication
(10) Pub. No.: US 2025/0090585 A1
(43) Pub. Date: Mar. 20, 2025

(54) MODIFIED REGULATORY T CELLS AND METHODS OF USING THE SAME

(71) Applicant: Beam Therapeutics Inc., Cambridge, MA (US)

(72) Inventors: Angelica Messana, Cambridge, MA (US); Colby Maldini, Cambridge, MA (US); Jason Michael Gehrke, Cambridge, MA (US)

(73) Assignee: Beam Therapeutics Inc., Cambridge, MA (US)

(21) Appl. No.: 18/965,215

(22) Filed: Dec. 2, 2024

Related U.S. Application Data
(63) Continuation of application No. PCT/US2023/067780, filed on Jun. 1, 2023.
(60) Provisional application No. 63/348,753, filed on Jun. 3, 2022.

(51) Int. Cl. A61K 35/17; A61K 39/00; C12N 5/0783; C12N 9/22; C12N 9/78; C12N 15/11

(52) U.S. Cl. CPC A61K 35/17; A61K 40/11; A61K 40/31; A61K 40/4203; C12N 5/0637; C12N 9/22; C12N 9/78; C12N 15/111; C07K 2319/09; C12N 2310/20; C12N 2510/00; C12Y 305/04004; C12Y 305/04005

(57) ABSTRACT

The disclosure features modified regulatory T (T_{REG}) cells having increased lineage stability, decreased activation of T cells (e.g., conventional T (T_{CONV}) cells), and/or increased resistance to immune rejection, and methods of producing and using such cells, for example, in the treatment of graft versus host disease (GVHD).

### CROSS REFERENCE TO RELATED APPLICATIONS

[0001] This application is a continuation under 35 U.S.C. § 111(a) of PCT International Patent Application No. PCT/US2023/067780, filed Jun. 1, 2023, designating the United States and published in English, which claims priority to and the benefit of U.S. Provisional Application No. 63/348,753 filed Jun. 3, 2022, the entire contents of each of which are incorporated by reference herein.

### SEQUENCE LISTING

[0002] This application contains a Sequence Listing which has been submitted electronically in XML format and is hereby incorporated by reference in its entirety. The Sequence Listing XML file, created on May 9, 2023, is named 180802-045902_PCT_SL.xml and is 3,769,384 bytes in size.

### BACKGROUND

[0003] There is a growing clinical need for an efficacious, suppressive cellular therapy for autoimmune and alloimmune diseases. For example, chronic graft versus host disease (cGVHD) occurs in 40-50% of all allo hematopoietic stem cell transplant (alloHSCT) recipients. However, current globally immunosuppressive regimens are often associated with undesired off-target toxicities and can be antithetical to immune tolerance; calcineurin inhibitors being key examples of this paradox. In contrast, suppressive cell-based therapies, including regulatory T (T_{REG}) cells, promise fewer off-target effects and induce immune tolerance in animal models. However, strategies remain unavailable for reliably sustaining transplanted T_{REG} cells in a subject and autologous cell therapies in general have numerous disadvantages associated with having to usually obtain the starting material from the patient to be treated, including long manufacturing times and the requirement that the patient cells are suitable despite previous therapies or disease state. Allogeneic cell therapies can overcome some challenges associated with autologous cell therapies, but challenges remain, including the limited persistence of allogeneic cell in the patient.

[0004] Therefore, there is a need for improved T_{REG} cells for treatment of autoimmune and alloimmune diseases.

### SUMMARY

[0005] As described below, the present disclosure features modified regulatory T (T_{REG}) cells having increased lineage stability, decreased activation of T cells (e.g., conventional T (T_{CONV}) cells), and/or increased resistance to immune rejection, and methods of producing and using such cells, for example, in the treatment of graft versus host disease (GVHD). The embodiments disclosed herein can provide superior methods of creating immune tolerance (e.g., to treat GVHD) without the toxicity and global immunosuppression associated with current regimens. Further, the embodiments provided herein can provide allogeneic cell therapies with lower cost and faster implantation than autologous cell therapies.

[0006] In one aspect, the disclosure features a method for producing a functionally enhanced and/or lineage stabilized regulatory T (T_{REG}) cell. The method involves contacting a T_{REG} cell with a base editor, or one or more polynucleotides encoding the base editor, where the base editor contains a polynucleotide programmable DNA binding polypeptide (napDNAbp), and a deaminase, and one or more guide RNAs (gRNAs), or one or more polynucleotides encoding the gRNAs, where the one or more gRNAstarget the base editor to effect an alteration in a nucleic acid molecule, thereby producing the functionally enhanced and/or lineage stabilized T_{REG} cell. The nucleic acid molecule encodes a polypeptide and/or contains a regulatory element associated with expression thereof. The polypeptide is selected from one or more of bone morphogenetic protein/retinoic acid-inducible neural-specific protein 1 (BRINP1), C terminus of HSC70-interacting protein (CHIP), Cluster of Differentiation 70 (CD70), c-JUN kinase 1 (JNK1), protein kinase C theta (PRKCQ), ring finger protein 20 (RNF20), and sirtuin 1 (SIRT1).

[0007] In another aspect, the disclosure features a method for producing a functionally enhanced and/or lineage stabilized regulatory T (T_{REG}) cell. The method involves contacting a T_{REG} cell with a base editor, or one or more polynucleotides encoding the base editor, where the base editor contains a polynucleotide programmable DNA binding polypeptide (napDNAbp), and a deaminase, and two or more guide RNAs (gRNAs), or one or more polynucleotides encoding the gRNAs. Each gRNA targets the base editor to effect an alteration in a nucleic acid molecule. Each nucleic acid molecule encodes a polypeptide and/or contains a regulatory element associated with expression of the polypeptide. A first polypeptide is selected from one or more of bone morphogenetic protein/retinoic acid-inducible neural-specific protein 1 (BRINP1), C terminus of HSC70-interacting protein (CHIP), c-JUN kinase 1 (JNK1), protein kinase C theta (PRKCQ), ring finger protein 20 (RNF20), and sirtuin 1 (SIRT1). A second polypeptide is selected from one or more of Cluster of Differentiation 58 (CD58), Cluster of Differentiation 70 (CD70), and programmed cell death 1 (PD-1).

[0008] In another aspect, the disclosure features a method for producing a functionally enhanced and/or lineage stabilized regulatory T (T_{REG}) cell. The method involves contacting a T_{REG} cell with a polynucleotide programmable DNA binding polypeptide (napDNAbp), or one or more polynucleotides encoding the napDNAbp, and one or more guide RNAs (gRNAs), or one or more polynucleotides encoding the gRNAs, that target the napDNAbp to cleave a target nucleic acid molecule and effect an alteration in the target nucleic acid molecule, thereby producing the functionally enhanced and/or lineage stabilized T_{REG} cell. The target nucleic acid molecule encodes a polypeptide and/or contains a regulatory element associated with expression thereof. The polypeptide is selected from one or more of bone morphogenetic protein/retinoic acid-inducible neural-specific protein 1 (BRINP1), C terminus of HSC70-interacting protein (CHIP), Cluster of Differentiation 70 (CD70), c-JUN kinase 1 (JNK1), protein kinase C theta (PRKCQ), ring finger protein 20 (RNF20), and sirtuin 1 (SIRT1)

[0009] In another aspect, the disclosure features a functionally enhanced and/or lineage stabilized regulatory T (T_{REG}) cell produced according to the method of any of the above aspects, or embodiments thereof.

[0010] In another aspect, the disclosure features a functionally enhanced and/or lineage stabilized regulatory T (T_{REG}) cell containing a nucleobase alteration that reduces or eliminates expression of a polypeptide selected from one or more of bone morphogenetic protein/retinoic acid-inducible neural-specific protein 1 (BRINP1), C terminus of HSC70-interacting protein (CHIP), Cluster of Differentiation 70 (CD70), c-JUN kinase 1 (JNK1), protein kinase C theta (PRKCQ), ring finger protein 20 (RNF20), and sirtuin 1 (SIRT1).

[0011] In another aspect, the disclosure features a functionally enhanced and/or lineage stabilized regulatory T (T_{REG}) cell containing a nucleobase alteration that reduces or eliminates expression of two or more polypeptides. The first polypeptide is selected from one or more of bone morphogenetic protein/retinoic acid-inducible neural-specific protein 1 (BRINP1), C terminus of HSC70-interacting protein (CHIP), c-JUN kinase 1 (JNK1), protein kinase C theta (PRKCQ), ring finger protein 20 (RNF20), and sirtuin 1 (SIRT1). The second polypeptide is selected from one or more of Cluster of Differentiation 58 (CD58), Cluster of Differentiation 70 (CD70), and programmed cell death 1 (PD-1).

[0012] In another aspect, the disclosure features a pharmaceutical composition containing a functionally enhanced and/or lineage stabilized regulatory T (T_{REG}) cell. The T_{REG} cell contains a nucleobase alteration that reduces or eliminates expression of a polypeptide selected from one or more of bone morphogenetic protein/retinoic acid-inducible neural-specific protein 1 (BRINP1), C terminus of HSC70-interacting protein (CHIP), Cluster of Differentiation 70 (CD70), c-JUN kinase 1 (JNK1), protein kinase C theta (PRKCQ), ring finger protein 20 (RNF20), and sirtuin 1 (SIRT1).

[0013] In another aspect, the disclosure features a pharmaceutical composition containing a functionally enhanced and/or lineage stabilized regulatory T (T_{REG}) cell. The T_{REG} cell contains a nucleobase alteration that reduces or eliminates expression two or more polypeptides. The first polypeptide is selected from one or more of bone morphogenetic protein/retinoic acid-inducible neural-specific protein 1 (BRINP1), C terminus of HSC70-interacting protein (CHIP), c-JUN kinase 1 (JNK1), protein kinase C theta (PRKCQ), ring finger protein 20 (RNF20), and sirtuin 1 (SIRT1). The second polypeptide is selected from one or more of Cluster of Differentiation 58 (CD58), Cluster of Differentiation 70 (CD70), and programmed cell death 1 (PD-1).

[0014] In another aspect, the disclosure features a pharmaceutical composition containing a guide RNA (gRNA) and a polynucleotide encoding a base editor containing a polynucleotide programmable DNA binding polypeptide (napDNAbp) domain and a deaminase domain. The gRNA contains a nucleic acid sequence that is complementary to a polynucleotide. The polynucleotide encodes a polypeptide and/or contains a regulatory element associated with expression of the polypeptide. The polypeptide is selected from one or more of bone morphogenetic protein/retinoic acid-inducible neural-specific protein 1 (BRINP1), C terminus of HSC70-interacting protein (CHIP), Cluster of Differentiation 70, c-JUN kinase 1 (JNK1), protein kinase C theta (PRKCQ), ring finger protein 20 (RNF20), and sirtuin 1 (SIRT1).

[0015] In another aspect, the disclosure features a pharmaceutical composition containing two or more guide RNAs (gRNA) and a polynucleotide encoding a base editor containing a polynucleotide programmable DNA binding polypeptide (napDNAbp) domain and a deaminase domain. where each gRNA contains a nucleic acid sequence that is complementary to a nucleic acid molecule. Each nucleic acid molecule encodes a polypeptide and/or contains a regulatory element associated with expression of the polypeptide. The first polypeptide is selected from one or more of bone morphogenetic protein/retinoic acid-inducible neural-specific protein 1 (BRINP1), C terminus of HSC70-interacting protein (CHIP), c-JUN kinase 1 (JNK1), protein kinase C theta (PRKCQ), ring finger protein 20 (RNF20), and sirtuin 1 (SIRT1), and where the second polypeptide is selected from one or more of Cluster of Differentiation 58 (CD58), Cluster of Differentiation 70 (CD70), and programmed cell death 1 (PD-1).

[0016] In another aspect, the disclosure features a kit containing an the functionally enhanced and/or stabilized T_{REG} cell of any aspect provided herein, or embodiments thereof.

[0017] In another aspect, the disclosure features a method of treating an autoimmune or alloimmune disease in a subject, the method involving administering to the subject an effective amount of a functionally enhanced and/or stabilized T_{REG} cell of any aspect provided herein, or embodiments thereof.

[0018] In another aspect, the disclosure features a guide RNA (gRNA), or a polynucleotide encoding the guide RNA, where the guide RNA contains a a nucleotide sequence with at least 70% sequence identity to a sequence selected from one or more of those listed in Tables 1A-1C or 2A-2C, or truncations thereof. The gRNA targets a base editor containing a nucleic acid programmable DNA binding protein (napDNAbp) to effect an alteration in a nucleic acid molecule encoding a polypeptide and/or containing a regulatory element associated with expression thereof, thereby producing a functionally enhanced and/or lineage stabilized T_{REG} cell. The polypeptide is selected from one or more of bone morphogenetic protein/retinoic acid-inducible neural-specific protein 1 (BRINP1), C terminus of HSC70-interacting protein (CHIP), Cluster of Differentiation 70 (CD70), c-JUN kinase 1 (JNK1), protein kinase C theta (PRKCQ), ring finger protein 20 (RNF20), and sirtuin 1 (SIRT1).

[0019] In another aspect, the disclosure features a method for producing a functionally enhanced and/or lineage stabilized regulatory T (T_{REG}) cell. The method involves contacting a T_{REG} cell with a base editor, or a polynucleotide encoding the base editor. The base editor contains a polynucleotide programmable DNA binding polypeptide (napDNAbp), and an adenosine deaminase. The method also involves contacting the T_{REG} cell with one or more of the following guide RNAs, or one or more polynucleotides encoding the one or more guide RNAs: a) a guide RNA containing a nucleotide sequence selected from one or more of TSBTx2810, TSBTx2813, and TSBTx2815; b) a guide RNA containing a nucleotide sequence selected from one or more of TSBTx2834 and TSBTx845; c) a guide RNA containing the nucleotide sequence TSBTx025; d) a guide RNA containing the nucleotide sequence TSBTx845; and e) a guide RNA containing a nucleotide sequence selected from one or more of TSBTx2817, TSBTx2818, TSBTx2819, TSBTx2820, TSBTx2821, TSBTx2822, TSBTx2823, TSBTx2824, TSBTx2825, TSBTx2826, TSBTx2827, TSBTx2828, TSBTx2830, and TSBTx2831. The method is associated with a reduction or elimination of expression in the T_{REG} of one or more of the following polypeptides: cluster of differentiation 70 (CD70), cluster of differentiation 58 (CD58), programmed cell death 1 (PD-1), beta-2 microglobulin (B2M), and sirtuin 1 (SIRT1).

[0020] In another aspect, the disclosure features a method for producing a functionally enhanced and/or lineage stabilized regulatory T (T_{REG}) cell. The method involves contacting a T_{REG} cell with a base editor, or a polynucleotide encoding the base editor. The base editor contains a polynucleotide programmable DNA binding polypeptide (napDNAbp), and a cytidine deaminase. The method also involves contacting the T_{REG} cell with a guide RNA, or a polynucleotide encoding the guide RNA. The guide RNA contains a nucleotide sequence selected from one or more of TSBTx2813, TSBTx2814, and TSBTx2816. The method is associated with a reduction or elimination of expression in the T_{REG} of a cluster of differentiation 70 (CD70) polypeptide.

[0021] In another aspect, the disclosure features a method for producing a functionally enhanced and/or lineage stabilized regulatory T (T_{REG}) cell. The method involves contacting a T_{REG} cell with a Cas12b polypeptide, or a polynucleotide encoding the Cas12b polypeptide. The method also involves contacting the T_{REG} cell with a guide RNA containing a nucleotide sequence selected from one or more of: SEQ ID NOs: 788 to 810, 878 to 903, 696-714, 737, 751-778, and 904-931, or a polynucleotide encoding the guide RNA. The method is associated with a reduction or elimination of C terminus of HSC70-interacting protein (CHIP) and/or ring finger protein 20 (RNF20) in the T_{REG} cell.

[0022] In another aspect, the disclosure features a cell prepared according to the method of any aspect provided herein, or embodiments thereof.

[0023] In another aspect, the disclosure features a pharmaceutical composition comprising the cell of any aspect provided herein, or embodiments thereof.

[0024] In any aspect provided herein, or embodiments thereof, the method involves contacting the T_{REG} cell with gRNAs containing each of the following nucleotide sequences: TSBTx2813, TSBTx2817, TSBTx2834, TSBTx025, and TSBTx845 to thereby reduce or eliminate expression of each of CD70, SIRT1, CD58, PD-1, and B2M in the T_{REG} cell.

[0025] In any aspect provided herein, or embodiments thereof, the method further involves contacting the T_{REG} cell with a gRNA that targets the base editor to effect an alteration in a nucleic acid molecule. The nucleic acid molecule encodes a polypeptide and/or contains a regulatory element associated with expression thereof. The polypeptide is selected from one or more of beta-2 microglobulin (B2M), Cluster of Differentiation 58, and programmed cell death 1 (PD-1).

[0026] In any aspect provided herein, or embodiments thereof, the method further involves overexpressing in the T_{REG} cell an inhibitory receptor selected from one or more of Human Leukocyte Antigen-E (HLA-E), Human Leukocyte Antigen-G (HLA-G), Programmed Death Ligand 1 (PD-L1), and Cluster of Differentiation 47 (CD47).

[0027] In any aspect provided herein, or embodiments thereof, the method further involves effecting an alteration in a third nucleic acid molecule, where the nucleic acid molecule encodes a beta-2 microglobulin (B2M) polypeptide and/or contains a regulatory element associated with expression thereof.

[0028] In any aspect provided herein, or embodiments thereof, the method involves editing a combination of nucleic acid molecules encoding a combination of two or more polypeptides and/or a regulatory element associated with expression thereof, where the combination of polypeptides is selected from one or more of: SIRT1, PD-1, CD70, and CD58; SIRT1, PD-1, and CD70; SIRT1, PD-1, and CD58; SIRT1, CD70, and CD58; SIRT1 and PD-1; SIRT1 and CD70; SIRT1 and CD58; SIRT1, PD-1, CD70, CD58, and B2M; SIRT1, PD-1, CD70, and B2M; SIRT1, PD-1, CD58 and B2M; SIRT1, CD70, CD58, and B2M; SIRT1, PD-1, and B2M; SIRT1, CD70, and B2M; SIRT1, CD58, and B2M; RNF20, PD-1, CD70, and CD58; RNF20, PD-1, and CD70; RNF20, PD-1, and CD58; RNF20, CD70, and CD58; RNF20 and PD-1; RNF20 and CD70; RNF20 and CD58; RNF20, PD-1, CD70, CD58, and B2M; RNF20, PD-1, CD70, and B2M; RNF20, PD-1, CD58 and B2M; RNF20, CD70, CD58, and B2M; RNF20, PD-1, and B2M; RNF20, CD70, and B2M; RNF20, CD58, and B2M; SIRT1, RNF20, PD-1, CD70, and CD58; SIRT1, RNF20, PD-1, and CD70; SIRT1, RNF20, PD-1, and CD58; SIRT1, RNF20, CD70, and CD58; SIRT1, RNF20, and PD-1; SIRT1, RNF20, and CD70; SIRT1, RNF20, and CD58; SIRT1, RNF20, PD-1, CD70, CD58, and B2M; SIRT1, RNF20, PD-1, CD70, and B2M; SIRT1, RNF20, PD-1, CD58, and B2M; SIRT1, RNF20, CD70, CD58, and B2M; SIRT1, RNF20, PD-1, and B2M; SIRT1, RNF20, CD70, and B2M; and SIRT1, RNF20, CD58, and B2M.

[0029] In any aspect provided herein, or embodiments thereof, FoxP3 expression is increased by at least about 10% relative to a reference cell. In any aspect provided herein, or embodiments thereof, FoxP3 expression is increased by at least about 25% relative to a reference cell. In any aspect provided herein, or embodiments thereof, FoxP3 expression is increased by at least about 50% relative to a reference cell. In any aspect provided herein, or embodiments thereof, helios expression is increased by at least about 2-fold relative to a reference cell. In any aspect provided herein, or embodiments thereof, helios expression is increased by about 3-fold relative to a reference cell. In any aspect provided herein, or embodiments thereof, CTLA4 expression is increased by about 2-fold relative to a reference cell. In any aspect provided herein, or embodiments thereof, CTLA4 expression is increased by about 3-fold relative to a reference cell.

[0030] In any aspect provided herein, or embodiments thereof, each guide RNA contains a sequence with at least about 85% sequence identity to a sequence selected from those listed in Table 1A-1C or 2A-2C, or truncations thereof. In any aspect provided herein, or embodiments, thereof, each guide RNA contains a sequence selected from one or more of TSBTx2810, TSBTx2813, TSBTx2815, TSBTx2813, TSBTx2814, TSBTx2816, TSBTx2834, TSBTx845, TSBTx025, TSBTx2817, TSBTx2817, TSBTx2818, TSBTx2819, TSBTx2820, TSBTx2821, TSBTx2822, TSBTx2823, TSBTx2824, TSBTx2825, TSBTx2826, TSBTx2827, TSBTx2828, TSBTx2830, or TSBTx2831, TSBTx1680, TSBTx1681, TSBTx1682, TSBTx1683, TSBTx1684, TSBTx1685, TSBTx1686, TSBTx1687, TSBTx1688, TSBTx1689, TSBTx1690, TSBTx1691, TSBTx1692, TSBTx1693, TSBTx1694, TSBTx1695, TSBTx1696, TSBTx1697, TSBTx1698, or TSBTx2853, TSBTx2813, TSBTx2817, TSBTx2834, TSBTx025, and TSBTx845.

[0031] In any aspect provided herein, or embodiments thereof, the alteration is associated with a reduction of g of a T_{CONV} cell by the functionally enhanced and/or lineage stabilized T_{REG} cell relative to a reference cell.

[0032] In any aspect provided herein, or embodiments thereof, the deaminase is a cytidine deaminase or an adenosine deaminase.

[0033] In any aspect provided herein, or embodiments thereof, the base editor contains a complex containing the deaminase and the polynucleotide programmable DNA binding polypeptide (napDNAbp), or the base editor contains a fusion protein containing the polynucleotide programmable DNA binding polypeptide (napDNAbp) fused to the deaminase. In any aspect provided herein, or embodiments thereof, the napDNAbp is Cas9 or Cas12. In any aspect provided herein, or embodiments thereof, the napDNAbp is a Streptococcus pyogenes Cas9 (SpCas9), a Staphylococcus aureus Cas9 (SaCas9), Streptococcus thermophilus 1 Cas9 (St1Cas9), or a variant thereof. In any aspect provided herein, or embodiments thereof, the napDNAbp contains a nuclease dead Cas9 (dCas9) or a Cas9 nickase (nCas9).

[0034] In any aspect provided herein, or embodiments thereof, the base editor further contains one or more uracil glycosylase inhibitors (UGIs). In any aspect provided herein, or embodiments thereof, the base editor further contains one or more nuclear localization signals (NLS). In embodiments, the NLS is a bipartite NLS.

[0035] In any aspect provided herein, or embodiments thereof, the alteration encodes a missense mutation and/or is associated with reduced expression of the polypeptide.

[0036] In any aspect provided herein, or embodiments thereof, the method further involves expressing a chimeric antigen receptor (CAR) in the T_{REG} cell.

[0037] In any aspect provided herein, or embodiments thereof, the T_{REG} cell is obtained from a healthy donor. In embodiments, the donor is a human.

[0038] In any aspect provided herein, or embodiments thereof, the guide RNAs contains a sequence selected from those listed in Tables 1A-1C and/or Tables 2A-2C, or truncations thereof.

[0039] In any aspect provided herein, or embodiments thereof, the functionally enhanced and/or lineage stabilized T_{REG} cell has increased persistence in a host, increased resistance to immune rejection, decreased risk of eliciting a host-versus-graft reaction.

[0040] In any aspect provided herein, or embodiments thereof, the napDNAbp further contains one or more nuclear localization signals (NLS).

[0041] In any aspect provided herein, or embodiments thereof, the cleavage disrupts a splice acceptor or splice donor site, promoter, intron, exon, enhancer, or an untranslated region (UTR). In any aspect provided herein, or embodiments thereof, the cleavage introduces a missense mutation and/or is associated with reduced expression of the polypeptide.

[0042] In any aspect provided herein, or embodiments thereof, the alteration contains an insertion or a deletion.

[0043] In any aspect provided herein, or embodiments thereof, the T_{REG} cell overexpresses an inhibitory receptor selected from one or more of Human Leukocyte Antigen-E (HLA-E), Human Leukocyte Antigen-G (HLA-G), Programmed Death Ligand 1 (PD-L1), and Cluster of Differentiation 47 (CD47).

[0044] In any aspect provided herein, or embodiments thereof, the T_{REG} cell contains a nucleobase alteration that reduces or eliminates expression of a polypeptide selected from one or more of beta-2 microglobulin (B2M), Cluster of Differentiation 58 (CD58), and programmed cell death 1 (PD-1). In any aspect provided herein, or embodiments thereof, the T_{REG} cell contains an alteration that reduces or eliminates expression of a combination of polypeptides selected from one or more of: SIRT1, PD-1, CD70, and CD58; SIRT1, PD-1, and CD70; SIRT1, PD-1, and CD58; SIRT1, CD70, and CD58; SIRT1 and PD-1; SIRT1 and CD70; SIRT1 and CD58; SIRT1, PD-1, CD70, CD58, and B2M; SIRT1, PD-1, CD70, and B2M; SIRT1, PD-1, CD58 and B2M; SIRT1, CD70, CD58, and B2M; SIRT1, PD-1, and B2M; SIRT1, CD70, and B2M; SIRT1, CD58, and B2M; RNF20, PD-1, CD70, and CD58; RNF20, PD-1, and CD70; RNF20, PD-1, and CD58; RNF20, CD70, and CD58; RNF20 and PD-1; RNF20 and CD70; RNF20 and CD58; RNF20, PD-1, CD70, CD58, and B2M; RNF20, PD-1, CD70, and B2M; RNF20, PD-1, CD58 and B2M; RNF20, CD70, CD58, and B2M; RNF20, PD-1, and B2M; RNF20, CD70, and B2M; RNF20, CD58, and B2M; SIRT1, RNF20, PD-1, CD70, and CD58; SIRT1, RNF20, PD-1, and CD70; SIRT1, RNF20, PD-1, and CD58; SIRT1, RNF20, CD70, and CD58; SIRT1, RNF20, and PD-1; SIRT1, RNF20, and CD70; SIRT1, RNF20, and CD58; SIRT1, RNF20, PD-1, CD70, CD58, and B2M; SIRT1, RNF20, PD-1, CD70, and B2M; SIRT1, RNF20, PD-1, CD58, and B2M; SIRT1, RNF20, CD70, CD58, and B2M; SIRT1, RNF20, PD-1, and B2M; SIRT1, RNF20, CD70, and B2M; and SIRT1, RNF20, CD58, and B2M.

[0045] In any aspect provided herein, or embodiments thereof, the T_{REG} cell overexpresses an inhibitory receptor selected from one or more of Human Leukocyte Antigen-E (HLA-E), Human Leukocyte Antigen-G (HLA-G), Programmed Death Ligand 1 (PD-L1), and Cluster of Differentiation 47 (CD47).

[0046] In any aspect provided herein, or embodiments thereof, the pharmaceutical composition further contains a gRNA that targets the base editor to effect an alteration in a nucleic acid molecule that encodes a polypeptide and/or contains a regulatory element associated with expression of the polypeptide. The polypeptide is selected from one or more of beta-2 microglobulin (B2M), Cluster of Differentiation 58 (CD58), and programmed cell death 1 (PD-1).

[0047] In any aspect provided herein, or embodiments thereof, the alloimmune disease is a graft-versus-host disease. In any aspect provided herein, or embodiments thereof, the nucleic acid programmable DNA binding protein is a Cas protein, Type VI Cas protein, Type V Cas protein, Cas9 protein, Cas 12 protein, or a Cas12b protein.

[0048] In any aspect provided herein, or embodiments thereof, the gRNA contains a spacer sequence containing a sequence having at least 75%, 80%, 85%, 90%, 95%, 98%, 99% or greater identity up to 100% identity to a sequence listed in Tables 2A-2C. In any aspect provided herein, or embodiments thereof, the gRNA contains a spacer sequence containing a sequence selected from those listed in Tables 2A-2C. In any aspect provided herein, or embodiments thereof, the guide RNA contains a sequence having at least 75%, 80%, 85%, 90%, 95%, 98%, 99% or greater identity up to 100% identity to a sequence selected from those listed in Tables 1A-1C. In any aspect provided herein, or embodiments thereof, the guide RNA contains any one of those sequences listed in Tables 1A-1C.

[0049] In any aspect provided herein, or embodiments thereof, the guide RNA is bound to a base editor and/or a polynucleotide programmable DNA binding polypeptide (napDNAbp).

[0050] In any aspect provided herein, or embodiments thereof, the base editor contains an adenosine deaminase. In any aspect provided herein, or embodiments thereof, the base editor contains a cytidine deaminase.

[0051] In any aspect provided herein, or embodiments thereof, the guide RNA contains a spacer sequence about 18-23 nucleotides in length. In any aspect provided herein, or embodiments thereof, the guide RNA contains a spacer sequence about 18 nucleotides in length. In any aspect provided herein, or embodiments thereof, the guide RNA contains a spacer sequence about 19 nucleotides in length. In any aspect provided herein, or embodiments thereof, the guide RNA contains a spacer sequence about 22 nucleotides in length. In any aspect provided herein, or embodiments thereof, the guide RNA contains a spacer sequence about 23 nucleotides in length.

[0052] In any aspect provided herein, or embodiments thereof, the method is not a process for modifying the germline genetic identity of human beings.

[0053] In any aspect provided herein, or embodiments thereof, the base editor contains two nuclear localization signals. In any aspect provided herein, or embodiments thereof, the adenosine deaminase is ABE8.20. In any aspect provided herein, or embodiments thereof, the Cas12 is Cas12b. In any aspect provided herein, or embodiments thereof, the base editor contains the amino acid sequence of SEQ ID NO: 3357.

[0054] In any aspect provided herein, or embodiments thereof, the polypeptide is CHIP or RNF20.

[0055] In any aspect provided herein, or embodiments thereof, the base editor is ABE8.20.

[0056] In any aspect provided herein, or embodiments thereof, the method involves reducing or eliminating expression in the T_{REG} of each of the following polypeptides: cluster of differentiation 70 (CD70), cluster of differentiation 58 (CD58), programmed cell death 1 (PD-1), beta-2 microglobulin (B2M), and sirtuin 1 (SIRT1).

### Definitions

[0057] Unless defined otherwise, all technical and scientific terms used herein have the meaning commonly understood by a person skilled in the art to which this disclosure belongs. The following references provide one of skill with a general definition of many of the terms used in this disclosure: Singleton et al., Dictionary of Microbiology and Molecular Biology (2nd ed. 1994); The Cambridge Dictionary of Science and Technology (Walker ed., 1988); The Glossary of Genetics, 5th Ed., R. Rieger et al. (eds.), Springer Verlag (1991); and Hale & Marham, The Harper Collins Dictionary of Biology (1991). As used herein, the following terms have the meanings ascribed to them below, unless specified otherwise.

[0058] By “adenine” or “9H-Purin-6-amine” is meant a purine nucleobase with the molecular formula C₅H₅N₅, having the structure

[chemical structure]

and corresponding to CAS No. 73-24-5.

[0059] By “adenosine” or “4-Amino-1-[(2R,3R,4S,5R)-3,4-dihydroxy-5-(hydroxymethyl)oxolan-2-yl]pyrimidin-2(1H)-one” is meant an adenine molecule attached to a ribose sugar via a glycosidic bond, having the structure

[chemical structure]

and corresponding to CAS No. 65-46-3. Its molecular formula is C₁₀H₁₃N₅O₄.

[0060] By “adenosine deaminase” or “adenine deaminase” is meant a polypeptide or fragment thereof capable of catalyzing the hydrolytic deamination of adenine or adenosine. In some embodiments, the deaminase or deaminase domain is an adenosine deaminase catalyzing the hydrolytic deamination of adenosine to inosine or deoxy adenosine to deoxyinosine. In some embodiments, the adenosine deaminase catalyzes the hydrolytic deamination of adenine or adenosine in deoxyribonucleic acid (DNA). The adenosine deaminases (e.g. engineered adenosine deaminases, evolved adenosine deaminases) provided herein may be from any organism (e.g., eukaryotic, prokaryotic), including but not limited to algae, bacteria, fungi, plants, invertebrates (e.g., insects), and vertebrates (e.g., amphibians, mammals). In some embodiments, the adenosine deaminase is an adenosine deaminase variant with one or more alterations and is capable of deaminating both adenine and cytosine in a target polynucleotide (e.g., DNA, RNA). In some embodiments, the target polynucleotide is single or double stranded. In some embodiments, the adenosine deaminase variant is capable of deaminating both adenine and cytosine in DNA. In embodiments, the adenosine deaminase variant is selected from those described in PCT/US2020/018192, PCT/US2020/049975, PCT/US2017/045381, and PCT/US2020/028568, the full contents of which are each incorporated herein by reference in their entireties for all purposes.

[0061] By “adenosine deaminase activity” is meant catalyzing the deamination of adenine or adenosine to guanine in a polynucleotide. In some embodiments, an adenosine deaminase variant as provided herein maintains adenosine deaminase activity (e.g., at least about 30%, 40%, 50%, 60%, 70%, 80%, 90% or more of the activity of a reference adenosine deaminase (e.g., TadA*8.20 or TadA*8.19)).

[0062] By “Adenosine Base Editor (ABE)” is meant a base editor comprising an adenosine deaminase.

[0063] By “Adenosine Base Editor (ABE) polynucleotide” is meant a polynucleotide encoding an ABE. By “Adenosine Base Editor 8 (ABE8) polypeptide” or “ABE8” is meant a base editor as defined herein comprising an adenosine deaminase or adenosine deaminase variant comprising one or more of the alterations listed in Table 5B, one of the combinations of alterations listed in Table 5B, or an alteration at one or more of the amino acid positions listed in Table 5B, such alterations are relative to the following reference sequence: MSEVEFSHEYWMRHALTLAKRARDEREVPVGAVLVLNNRVIGEGWNRAIGLHDPTAHAEIMA LRQGGLVMQNYRLIDATLYVTFEPCVMCAGAMIHSRIGRVVFGVRNAKTGAAGSLMDVLHYP GMNHRVEITEGILADECAALLCYFFRMPRQVFNAQKKAQSSTD (SEQ ID NO: 1), or a corresponding position in another adenosine deaminase. In embodiments, ABE8 comprises alterations at amino acids 82 and/or 166 of SEQ ID NO: 1 In some embodiments, ABE8 comprises further alterations, as described herein, relative to the reference sequence.

[0064] By “Adenosine Base Editor 8 (ABE8) polynucleotide” is meant a polynucleotide encoding an ABE8 polypeptide.

[0065] “Administering” is referred to herein as providing one or more compositions described herein to a patient or a subject. By way of example and without limitation, composition administration (e.g., injection) can be performed by intravenous (i.v.) injection, sub-cutaneous (s.c.) injection, intradermal (i.d.) injection, intraperitoneal (i.p.) injection, or intramuscular (i.m.) injection. One or more such routes can be employed. Parenteral administration can be, for example, by bolus injection or by gradual perfusion over time. In some embodiments, parenteral administration includes infusing or injecting intravascularly, intravenously, intramuscularly, intraarterially, intrathecally, intratumorally, intradermally, intraperitoneally, transtracheally, subcutaneously, subcuticularly, intraarticularly, subcapsularly, subarachnoidly and intrasternally. Alternatively, or concurrently, administration can be by the oral route.

[0066] By “agent” is meant any small molecule chemical compound, antibody, nucleic acid molecule, or polypeptide, or fragments thereof.

[0067] “Allogeneic,” as used herein, refers to cells of the same species that differ genetically and interact antigenically.

[0068] By “alteration” is meant a change in the level, structure, or activity of an analyte, gene or polypeptide as detected by standard art known methods such as those described herein. As used herein, an alteration includes a change (e.g., increase or decrease) in expression levels. In embodiments, the increase or decrease in expression levels is by 10%, 25%, 40%, 50%, or greater. In some embodiments, an alteration includes an insertion, deletion, or substitution of a nucleobase or amino acid (by, e.g., genetic engineering).

[0069] By “ameliorate” is meant decrease, suppress, attenuate, diminish, arrest, or stabilize the development or progression of a disease.

[0070] By “analog” is meant a molecule that is not identical but has analogous functional or structural features. For example, a polypeptide analog retains the biological activity of a corresponding naturally occurring polypeptide, while having certain biochemical modifications that enhance the analog's function relative to a naturally occurring polypeptide. Such biochemical modifications could increase the analog's protease resistance, membrane permeability, or half-life, without altering, for example, ligand binding. An analog may include an unnatural amino acid.

[0071] As used herein, the term “antibody” refers to an immunoglobulin molecule that specifically binds to, or is immunologically reactive with, a particular antigen, and includes polyclonal, monoclonal, genetically engineered, and otherwise modified forms of antibodies, including but not limited to chimeric antibodies, humanized antibodies, heteroconjugate antibodies (e.g., bi- tri- and quad-specific antibodies, diabodies, triabodies, and tetrabodies), and antigen binding fragments of antibodies, including, for example, Fab′, F(ab′)2, Fab, Fv, rlgG, and scFv fragments. Unless otherwise indicated, the term “monoclonal antibody” (mAb) is meant to include both intact molecules, as well as antibody fragments (including, for example, Fab and F(ab′)2 fragments) that are capable of specifically binding to a target protein. As used herein, the Fab and F(ab′)2 fragments refer to antibody fragments that lack the Fc fragment of an intact antibody.

[0072] Antibodies (immunoglobulins) comprise two heavy chains linked together by disulfide bonds, and two light chains, with each light chain being linked to a respective heavy chain by disulfide bonds in a “Y” shaped configuration. Each heavy chain has at one end a variable domain (VH) followed by a number of constant domains (CH). Each light chain has a variable domain (VL) at one end and a constant domain (CL) at its other end. The variable domain of the light chain (VL) is aligned with the variable domain of the heavy chain (VL), and the light chain constant domain (CL) is aligned with the first constant domain of the heavy chain (CH1). The variable domains of each pair of light and heavy chains form the antigen binding site. The isotype of the heavy chain (gamma, alpha, delta, epsilon or mu) determines the immunoglobulin class (IgG, IgA, IgD, IgE or IgM, respectively). The light chain is either of two isotypes (kappa (κ) or lambda (λ)) found in all antibody classes. The terms “antibody” or “antibodies” include intact antibodies, such as polyclonal antibodies or monoclonal antibodies (mAbs), as well as proteolytic portions or fragments thereof, such as the Fab or F(ab′)2 fragments, that are capable of specifically binding to a target protein. Antibodies may include chimeric antibodies, recombinant and engineered antibodies, and antigen binding fragments thereof. Exemplary functional antibody fragments comprising whole or essentially whole variable regions of both the light and heavy chains are defined as follows: (i) Fv, defined as a genetically engineered fragment consisting of the variable region of the light chain and the variable region of the heavy chain expressed as two chains; (ii) single-chain Fv (“scFv”), a genetically engineered single-chain molecule including the variable region of the light chain and the variable region of the heavy chain, linked by a suitable polypeptide linker; (iii) Fab, a fragment of an antibody molecule containing a monovalent antigen-binding portion of an antibody molecule, obtained by treating an intact antibody with the enzyme papain to yield the intact light chain and the Fd fragment of the heavy chain, which consists of the variable and CH1 domains thereof; (iv) Fab′, a fragment of an antibody molecule containing a monovalent antigen-binding portion of an antibody molecule, obtained by treating an intact antibody with the enzyme pepsin, followed by reduction (two Fab′ fragments are generated per antibody molecule); and (v) F(ab′)2, a fragment of an antibody molecule containing a monovalent antigen-binding portion of an antibody molecule, obtained by treating an intact antibody with the enzyme pepsin (i.e., a dimer of Fab′ fragments held together by two disulfide bonds).

[0073] “Autologous,” as used herein, refers to cells from the same subject.

[0074] By “beta-2 microglobulin (β2M; B2M) polypeptide” is meant a protein having at least about 85% amino acid sequence identity to UniProt Accession No. P61769, which corresponds to SEQ ID NO: 973 (sp|P61769|B2MG HUMAN Beta-2-microglobulin OS=Homo sapiens OX=9606 GN=B2M PE=1 SV=1), or a fragment thereof having immunomodulatory activity.

[0075] By “beta-2-microglobulin (β2M; B2M) polynucleotide” is meant a nucleic acid molecule encoding an β2M polypeptide, as well as the introns, exons, 3′ untranslated regions, 5′ untranslated regions, and regulatory sequences associated with its expression, or fragments thereof. In embodiments, a β2M polynucleotide is the genomic sequence, cDNA, mRNA, or gene associated with and/or required for β2M expression. The beta-2-microglobulin gene encodes a serum protein associated with the major histocompatibility complex. “β2M” is sometimes recited as “B2M” herein. β2M is involved in non-self-recognition by host CD8+ T cells. An exemplary β2M polynucleotide sequence is provided at Genbank Accession No. DQ217933.1, which corresponds to SEQ ID NO: 974 (DQ217933.1 Homo sapiens beta-2-microglobin (β2M) gene, complete cds).

[0076] By “base editor (BE),” or “nucleobase editor polypeptide (NBE)” is meant an agent that binds a polynucleotide and has nucleobase modifying activity. In various embodiments, the base editor comprises a nucleobase modifying polypeptide (e.g., a deaminase) and a polynucleotide programmable nucleotide binding domain (e.g., Cas9 or Cpf1) in conjunction with a guide polynucleotide (e.g., guide RNA (gRNA)). Representative nucleic acid and protein sequences of base editors include those sequences having about or at least about 85% sequence identity to any base editor sequence provided in the sequence listing, such as those corresponding to any of SEQ ID NOs: 2-11.

[0077] By “base editing activity” is meant acting to chemically alter a base within a polynucleotide. In one embodiment, a first base is converted to a second base. In one embodiment, the base editing activity is cytidine deaminase activity, e.g., converting target C·G to T·A. In another embodiment, the base editing activity is adenosine or adenine deaminase activity, e.g., converting A·T to G·C.

[0078] The term “base editor system” refers to an intermolecular complex for editing a nucleobase of a target nucleotide sequence. In various embodiments, the base editor (BE) system comprises (1) a polynucleotide programmable nucleotide binding domain, a deaminase domain (e.g., cytidine deaminase or adenosine deaminase) for deaminating nucleobases in the target nucleotide sequence; and (2) one or more guide polynucleotides (e.g., guide RNA) in conjunction with the polynucleotide programmable nucleotide binding domain. In various embodiments, the base editor (BE) system comprises a nucleobase editor domain selected from an adenosine deaminase or a cytidine deaminase, and a domain having nucleic acid sequence specific binding activity. In some embodiments, the base editor system comprises (1) a base editor (BE) comprising a polynucleotide programmable DNA binding domain and a deaminase domain for deaminating one or more nucleobases in a target nucleotide sequence; and (2) one or more guide RNAs in conjunction with the polynucleotide programmable DNA binding domain. In some embodiments, the polynucleotide programmable nucleotide binding domain is a polynucleotide programmable DNA binding domain. In some embodiments, the base editor is a cytidine base editor (CBE). In some embodiments, the base editor is an adenine or adenosine base editor (ABE). In some embodiments, the base editor is an adenine or adenosine base editor (ABE) or a cytidine or cytosine base editor (CBE). In some embodiments, the base editor system (e.g., a base editor system comprising a cytidine deaminase) comprises a uracil glycosylase inhibitor or other agent or peptide (e.g., a uracil stabilizing protein such as provided in WO2022015969, the disclosure of which is incorporated herein by reference in its entirety for all purposes) that inhibits the inosine base excision repair system. By “BMP/retinoic acid-inducible neural-specific protein 1 (BRINP1) polypeptide” is meant a protein having at least about 85% amino acid sequence identity to UniProt Accession No. 060477, which corresponds to SEQ ID NO: 964 (sp|O60477|BRNP1_HUMAN BMP/retinoic acid-inducible neural-specific protein 1 OS=Homo sapiens OX=9606 GN=BRINP1 PE=1 SV=2), or a fragment thereof having immunomodulatory activity.

[0079] By “BMP/retinoic acid-inducible neural-specific protein 1 (BRINP1) polynucleotide” is meant a nucleic acid molecule encoding a BRINP1 polypeptide, as well as the introns, exons, 3′ untranslated regions, 5′ untranslated regions, and regulatory sequences associated with its expression, or fragments thereof. In embodiments, a BRINP1 polynucleotide is the genomic sequence, cDNA, mRNA, or gene associated with and/or required for BRINP1 expression. An exemplary BRINP1 polynucleotide sequence from Homo sapiens is provided at NCBI Reference Sequence Accession No. NM_014618.3 which corresponds to SEQ ID NO: 965 (NM_014618.3: Homo sapiens BMP/retinoic acid inducible neural specific 1 (BRINP1), mRNA), and at NCBI Ref. Seq. Accession No. NC_000019.10, which is provided in the Sequence Listing as SEQ ID NO: 966.

[0080] The term “Cas9” or “Cas9 domain” refers to an RNA guided nuclease comprising a Cas9 protein, or a fragment thereof (e.g., a protein comprising an active, inactive, or partially active DNA cleavage domain of Cas9, and/or the gRNA binding domain of Cas9). A Cas9 nuclease is also referred to sometimes as a casn1 nuclease or a CRISPR (clustered regularly interspaced short palindromic repeat) associated nuclease.

[0081] By “chimeric antigen receptor” or “CAR” is meant a synthetic or engineered receptor comprising an extracellular antigen binding domain operationally joined to one or more intracellular signaling domains where the CAR confers specificity for an antigen bound by the antigen binding domain onto an immune effector cell. In embodiments, the intracellular signaling domain is a T cell signaling domain. In embodiments, the immune effector cell is a regulatory T (T_{REG}) cell. In embodiments, the CAR is a SUPRA CAR, an anti-tag CAR, a TCR-CAR, or a TCR-like CAR (see, e.g., Guedan, et al. “Engineering and Design of Chimeric Antigen Receptors,” Methods and Clinical Development, 12:145-156 (2019); Poorebrahim, et al., “TCR-like CARs and TCR-CARs targeting neoepitopes: an emerging potential,” Cancer Gene Therapy, 28:581-589 (2021); and Minutolo, et al. “The Emergence of Universal Immune Receptor T Cell Therapy for Cancer,” Front Oncol., 9:176 (2019), the disclosures of which are incorporated herein by reference in their entireties for all purposes).

[0082] By “chimeric antigen receptor T cell” or “CAR-T cell” is meant a T cell expressing a CAR that has antigen specificity determined by the antibody-derived targeting domain of the CAR. As used herein, “CAR-T cells” include regulatory T (T_{REG}) cells. As used herein, “CAR-T cells” include cells engineered to express a CAR or a T cell receptor (TCR). Methods of making CARs are publicly available (see, e.g., Park et al., Trends Biotechnol., 29:550-557, 2011; Grupp et al., N Engl J Med., 368:1509-1518, 2013; Han et al., J. Hematol Oncol. 6:47, 2013; Haso et al., (2013) Blood, 121, 1165-1174; Mohseni, et al., (2020) Front. Immunol., 11, art. 1608, doi: 10.3389/fimmu.2020.01608; Eggenhuizen, et al. Int. J. Mol. Sci. (2020), 21:7015, doi: 10.3390/ijms21197015; PCT Pubs. WO2012/079000, WO2013/059593; and U.S. Pub. 2012/0213783, the disclosure of each of which is incorporated herein by reference herein in its entirety for all purposes).

[0083] By “class II, major histocompatibility complex, transactivator (CIITA) polypeptide” is meant a protein having at least about 85% amino acid sequence identity to NCBI Ref. Seq. Accession No. NP_001273331.1, or a fragment thereof having immunomodulatory activity.

[0084] By “class II, major histocompatibility complex, transactivator (CIITA) polypeptide polynucleotide” is meant a nucleic acid molecule encoding an CIITA polypeptide, as well as the introns, exons, 3′ untranslated regions, 5′ untranslated regions, and regulatory sequences associated with its expression, or fragments thereof. In embodiments, a CIITA polynucleotide is the genomic sequence, cDNA, mRNA, or gene associated with and/or required for CIITA expression. An exemplary CIITA polynucleotide sequence is provided at NCBI Ref. Seq. Accession No. NM_001286402.1. The CIITA gene corresponds to Ensembl: ENSG00000179583.

[0085] By “Cluster of Differentiation 47 (CD47) polypeptide” is meant a protein having at least about 85% amino acid sequence identity to NCBI Ref. Seq. Accession No. NP_001768.1, or a fragment thereof having immunomodulatory activity.

[0086] By “Cluster of Differentiation 47 (CD47) polynucleotide” is meant a nucleic acid molecule encoding an CD47 polypeptide, as well as the introns, exons, 3′ untranslated regions, 5′ untranslated regions, and regulatory sequences associated with its expression, or fragments thereof. In embodiments, a CD47 polynucleotide is the genomic sequence, cDNA, mRNA, or gene associated with and/or required for CD47 expression. An exemplary CD47 polynucleotide sequence is provided at NCBI Ref. Seq. Accession No. NM_001777.4. The CD47 gene corresponds to Ensembl: ENSG00000196776.

[0087] By “Cluster of Differentiation 52 (CD52) polypeptide” is meant a protein having at least about 85% amino acid sequence identity to NCBI Ref. Seq. Accession No. NP_001794.2, or a fragment thereof having immunomodulatory activity.

[0088] By “Cluster of Differentiation 52 (CD52) polynucleotide” is meant a nucleic acid molecule encoding a CD52 polypeptide, as well as the introns, exons, 3′ untranslated regions, 5′ untranslated regions, and regulatory sequences associated with its expression, or fragments thereof. In embodiments, a CD52 polynucleotide is the genomic sequence, cDNA, mRNA, or gene associated with and/or required for CD52 expression. An exemplary CD52 polynucleotide sequence is provided at NCBI Ref. Seq. Accession No. NM_001803.3. The CD52 gene corresponds to ENSG00000169442.

[0089] By “Cluster of Differentiation 58 (CD58) polypeptide” is meant a protein having at least about 85% amino acid sequence identity to NCBI Reference Sequence Accession No. NP_001770.1, which corresponds to SEQ ID NO: 975, or a fragment thereof that functions in an immune response. CD58 and the immunobiology thereof is described in Zhang, et al. “CD58 Immunobiology at a Glance,” Frontiers in Immunology, vol. 12, article 705260 (2021), the disclosure of which is incorporated herein by reference in its entirety for all purposes.

[0090] By “Cluster of Differentiation 58 (CD58) polynucleotide” is meant a nucleic acid molecule encoding an CD58 polypeptide, as well as the introns, exons, 3′ untranslated regions, 5′ untranslated regions, and regulatory sequences associated with its expression, or fragments thereof. In embodiments, a CD58 polynucleotide is the genomic sequence, cDNA, mRNA, or gene associated with and/or required for CD58 expression. An exemplary CD58 polynucleotide is provided at NCBI Accession No. NM_001779.3, which corresponds to SEQ ID NO: 976.

[0091] By “CD70 Molecule (CD70) polypeptide” or “Cluster of Differentiation 70 (CD70) polypeptide” is meant a protein having at least about 85% amino acid sequence identity to GenBank Accession No. AAH00725.1, which corresponds to SEQ ID NO: 967 (AAH00725.1 CD70 molecule [Homo sapiens]), or a fragment thereof having immunomodulatory activity.

[0092] By “CD70 Molecule (CD70) polynucleotide” or “Cluster of Differentiation 70 (CD70) polynucleotide” is meant a nucleic acid molecule encoding a CD70 polypeptide, as well as the introns, exons, 3′ untranslated regions, 5′ untranslated regions, and regulatory sequences associated with its expression, or fragments thereof. In embodiments, a CD70 polynucleotide is the genomic sequence, cDNA, mRNA, or gene associated with and/or required for CD70 expression. An exemplary CD70 polynucleotide sequence from Homo sapiens is provided at GenBank Accession No. BC000725.2 which corresponds to SEQ ID NO: 968 (BC000725.2:97-678 Homo sapiens CD70 molecule, mRNA (cDNA clone MGC:1597 IMAGE:3506629), complete cds), and at NCBI Ref. Seq. Accession No. NC_000019.10, which is provided in the Sequence Listing as SEQ ID NO: 969.

[0093] By “C terminus of HSC70-interacting protein (CHIP) polypeptide” is meant a protein having at least about 85% amino acid sequence identity to GenBank Accession No. AAH63617.1, which corresponds to SEQ ID NO: 970 (AAH63617.1 STIP1 homology and U-box containing protein 1 [Homo sapiens]), or a fragment thereof having ubiquitin ligase activity.

[0094] By “C terminus of HSC70-interacting protein (CHIP) polynucleotide” is meant a nucleic acid molecule encoding a CHIP polypeptide, as well as the introns, exons, 3′ untranslated regions, 5′ untranslated regions, and regulatory sequences associated with its expression, or fragments thereof. In embodiments, a CHIP polynucleotide is the genomic sequence, cDNA, mRNA, or gene associated with and/or required for CHIP expression. An exemplary CHIP polynucleotide sequence from Homo sapiens is provided at NCBI Reference Sequence Accession No. NG_034141.1 which corresponds to SEQ ID NO: 971 (NG 034141.1:681-719,1226-1387, 1861-2009,2166-2278, 2349-2449,2529-2589, 2671-2942 Homo sapiens STIP1 homology and U-box containing protein 1 (STUB1), RefSeqGene on chromosome 16), and at NCBI Ref. Seq. Accession No. NG_034141.1, which is provided in the Sequence Listing as SEQ ID NO: 972.

[0095] By “Cluster of Differentiation 123 (CD123) polypeptide” is meant a protein having at least about 85% amino acid sequence identity to NCBI Ref. Seq. Accession No. NP_002174.1, or a fragment thereof having immunomodulatory activity.

[0096] By “Cluster of Differentiation 123 (CD123) polynucleotide” is meant a nucleic acid molecule encoding a CD123 polypeptide, as well as the introns, exons, 3′ untranslated regions, 5′ untranslated regions, and regulatory sequences associated with its expression, or fragments thereof. In embodiments, a CD123 polynucleotide is the genomic sequence, cDNA, mRNA, or gene associated with and/or required for CD123 expression. An exemplary CD123 polynucleotide sequence is provided at NCBI Ref. Seq. Accession No. NM_002183.4. The CD123 gene corresponds to Ensembl: ENSG00000185291.

[0097] By “cluster of differentiation 155 (CD155) polypeptide” is meant a protein having at least about 85% amino acid sequence identity to GenBank Accession No. AAF69803.1, or a fragment thereof having immunomodulatory activity.

[0098] By “cluster of differentiation 155 (CD155) polynucleotide” is meant a nucleic acid molecule encoding a CD155 polypeptide, as well as the introns, exons, 3′ untranslated regions, 5′ untranslated regions, and regulatory sequences associated with its expression, or fragments thereof. In embodiments, a CD155 polynucleotide is the genomic sequence, cDNA, mRNA, or gene associated with and/or required for CD155 expression. An exemplary CD155 polynucleotide sequence is provided at GenBank Accession No. AC068948.1. The CD155 gene corresponds to ENSG00000073008.15.

[0099] By “Homo sapiens cytotoxic T-lymphocyte associated protein 4 (CTLA4) polypeptide” is meant a protein having at least about 85% amino acid sequence identity to GenBank Accession No. AAL07473.1, or a fragment thereof having immunomodulatory activity.

[0100] By “Homo sapiens cytotoxic T-lymphocyte associated protein 4 (CTLA4) polynucleotide” is meant a nucleic acid molecule encoding an CTLA4 polypeptide, as well as the introns, exons, 3′ untranslated regions, 5′ untranslated regions, and regulatory sequences associated with its expression, or fragments thereof. In embodiments, a CTLA4 polynucleotide is the genomic sequence, cDNA, mRNA, or gene associated with and/or required for CTLA4 expression. An exemplary CTLA4 polynucleotide sequence from Homo sapiens is provided at GenBank Accession No. AF414120.1.

[0101] The term “conservative amino acid substitution” or “conservative mutation” refers to the replacement of one amino acid by another amino acid with a common property. A functional way to define common properties between individual amino acids is to analyze the normalized frequencies of amino acid changes between corresponding proteins of homologous organisms (Schulz, G. E. and Schirmer, R. H., Principles of Protein Structure, Springer-Verlag, New York (1979)). According to such analyses, groups of amino acids can be defined where amino acids within a group exchange preferentially with each other, and therefore resemble each other most in their impact on the overall protein structure (Schulz, G. E. and Schirmer, R. H., supra). Non-limiting examples of conservative mutations include amino acid substitutions of amino acids, for example, lysine for arginine and vice versa such that a positive charge can be maintained; glutamic acid for aspartic acid and vice versa such that a negative charge can be maintained; serine for threonine such that a free —OH can be maintained; and glutamine for asparagine such that a free —NH₂ can be maintained.

[0102] The term “coding sequence” or “protein coding sequence” as used interchangeably herein refers to a segment of a polynucleotide that codes for a protein. Coding sequences can also be referred to as open reading frames. The region or sequence is bounded nearer the 5′ end by a start codon and nearer the 3′ end with a stop codon. Stop codons useful with the base editors described herein include the following: TAG, TAA, and TGA.

[0103] By “complex” is meant a combination of two or more molecules whose interaction relies on inter-molecular forces. Non-limiting examples of inter-molecular forces include covalent and non-covalent interactions. Non-limiting examples of non-covalent interactions include hydrogen bonding, ionic bonding, halogen bonding, hydrophobic bonding, van der Waals interactions (e.g., dipole-dipole interactions, dipole-induced dipole interactions, and London dispersion forces), and π-effects. In an embodiment, a complex comprises polypeptides, polynucleotides, or a combination of one or more polypeptides and one or more polynucleotides. In one embodiment, a complex comprises one or more polypeptides that associate to form a base editor (e.g., base editor comprising a nucleic acid programmable DNA binding protein, such as Cas9, and a deaminase) and a polynucleotide (e.g., a guide RNA). In an embodiment, the complex is held together by hydrogen bonds. It should be appreciated that one or more components of a base editor (e.g., a deaminase, or a nucleic acid programmable DNA binding protein) may associate covalently or non-covalently. As one example, a base editor may include a deaminase covalently linked to a nucleic acid programmable DNA binding protein (e.g., by a peptide bond). Alternatively, a base editor may include a deaminase and a nucleic acid programmable DNA binding protein that associate noncovalently (e.g., where one or more components of the base editor are supplied in trans and associate directly or via another molecule such as a protein or nucleic acid). In an embodiment, one or more components of the complex are held together by hydrogen bonds.

[0104] By “cytosine” or “4-Aminopyrimidin-2(1H)-one” is meant a purine nucleobase with the molecular formula C₄H₅N₃O, having the structure

[chemical structure]

and corresponding to CAS No. 71-30-7.

[0105] By “cytidine” is meant a cytosine molecule attached to a ribose sugar via a glycosidic NH₂ bond, having the structure

[chemical structure]

and corresponding to CAS No. 65-46-3. Its molecular formula is C₉H₁₃N₃O₅.

[0106] By “Cytidine Base Editor (CBE)” is meant a base editor comprising a cytidine deaminase.

[0107] By “Cytidine Base Editor (CBE) polynucleotide” is meant a polynucleotide encoding a CBE.

[0108] By “cytidine deaminase” or “cytosine deaminase” is meant a polypeptide or fragment thereof capable of deaminating cytidine or cytosine. In embodiments, the cytidine or cytosine is present in a polynucleotide. In one embodiment, the cytidine deaminase converts cytosine to uracil or 5-methylcytosine to thymine. The terms “cytidine deaminase” and “cytosine deaminase” are used interchangeably throughout the application. Petromyzon marinus cytosine deaminase 1 (PmCDA1) (SEQ ID NO: 13-14), Activation-induced cytidine deaminase (AICDA) (SEQ ID NOs: 15-21), and APOBEC (SEQ ID NOs: 12-61) are exemplary cytidine deaminases. Further exemplary cytidine deaminase (CDA) sequences are provided in the Sequence Listing as SEQ ID NOs: 62-66 and SEQ ID NOs: 67-189. Non-limiting examples of cytidine deaminases include those described in PCT/US20/16288, PCT/US2018/021878, 180802-021804/PCT, PCT/US2018/048969, and PCT/US2016/058344.

[0109] By “cytosine deaminase activity” is meant catalyzing the deamination of cytosine or cytidine. In one embodiment, a polypeptide having cytosine deaminase activity converts an amino group to a carbonyl group. In an embodiment, a cytosine deaminase converts cytosine to uracil (i.e., C to U) or 5-methylcytosine to thymine (i.e., 5mC to T). In some embodiments, a cytosine deaminase as provided herein has increased cytosine deaminase activity (e.g., at least 10-fold, 20-fold, 30-fold, 40-fold, 50-fold, 60-fold, 70-fold, 80-fold, 90-fold, 100-fold or more) relative to a reference cytosine deaminase.

[0110] The term “deaminase” or “deaminase domain,” as used herein, refers to a protein or fragment thereof that catalyzes a deamination reaction.

[0111] “Detect” refers to identifying the presence, absence, or amount of the analyte to be detected. In one embodiment, a sequence alteration in a polynucleotide or polypeptide is detected. In another embodiment, the presence of indels is detected.

[0112] By “detectable label” is meant a composition that when linked to a molecule of interest renders the latter detectable, via spectroscopic, photochemical, biochemical, immunochemical, or chemical means. For example, useful labels include radioactive isotopes, magnetic beads, metallic beads, colloidal particles, fluorescent dyes, electron-dense reagents, enzymes (for example, as commonly used in an enzyme linked immunosorbent assay (ELISA)), biotin, digoxigenin, or haptens.

[0113] By “disease” is meant any condition or disorder that damages or interferes with the normal function of a cell, tissue, or organ. Exemplary diseases include diseases amenable to treatment with modified T_{REG} cells of the present disclosure (e.g., CAR T_{REG} cells). Non-limiting examples of diseases include autoimmune diseases and alloimmune diseases, such as graft versus host disease (GVHD), acute GVHD, or chronic GVHD. In embodiments, the disease is any disease or disorder associated with an undesired immune activity or response. Further non-limiting examples of diseases include type I diabetes, multiple sclerosis, rheumatoid arthritis, amyotrophic lateral sclerosis (ALS), hemophilia, autoantibody-mediated autoimmune disease, asthma, systemic lupus erythematosus (SLE), Chrohn's disease, cutaneious lupus, and pemphigus.

[0114] By “effective amount” is meant the amount of an agent or active compound, e.g., a base editor as described herein, that is required to ameliorate the symptoms of a disease relative to an untreated patient or an individual without disease, i.e., a healthy individual, or is the amount of the agent or active compound sufficient to elicit a desired biological response. The effective amount of active compound(s) used to practice embodiments of the disclosure for therapeutic treatment of a disease varies depending upon the manner of administration, the age, body weight, and general health of the subject. Ultimately, the attending physician or veterinarian will decide the appropriate amount and dosage regimen. Such amount is referred to as an “effective” amount. In one embodiment, an effective amount is the amount of a base editor of the disclosure sufficient to introduce an alteration in a gene of interest in a cell (e.g., a cell in vitro or in vivo). In one embodiment, an effective amount is the amount of a base editor required to achieve a therapeutic effect. Such therapeutic effect need not be sufficient to alter a pathogenic gene in all cells of a subject, tissue, or organ, but only to alter the pathogenic gene in about 1%, 5%, 10%, 25%, 50%, 75% or more of the cells present in a subject, tissue, or organ. In one embodiment, an effective amount is the amount of a modified immune cell (e.g., a modified T_{REG} cell or CAR T_{REG} cell as provided herein) required to achieve a therapeutic effect (e.g., reduce or abate graft versus host disease, or suppress an undesirable immune response). In one embodiment, an effective amount is sufficient to ameliorate one or more symptoms of a disease.

[0115] The term “exonuclease” refers to a protein or polypeptide capable of digesting a nucleic acid (e.g., RNA or DNA) from free ends. The term “endonuclease” refers to a protein or polypeptide capable of catalyzing (e.g., cleaving) internal regions in a nucleic acid (e.g., DNA or RNA).

[0116] By “Forkhead box P3 (FOXP3) polypeptide” is meant a protein having at least about 85% amino acid sequence identity to GenBank Accession No. ABQ15210.1, or a fragment thereof having DNA binding and/or transcriptional regulatory activity. In embodiments, FoxP3 supports the development and/or function of a T_{REG} cell.

[0117] By “Forkhead box P3 (FOXP3) polynucleotide” is meant a nucleic acid molecule encoding a FOXP3 polypeptide, as well as the introns, exons, 3′ untranslated regions, 5′ untranslated regions, and regulatory sequences associated with its expression, or fragments thereof. In embodiments, a FOXP3 polynucleotide is the genomic sequence, cDNA, mRNA, or gene associated with and/or required for FOXP3 expression. An exemplary FOXP3 polynucleotide sequence from Homo sapiens is provided at Genbank Accession Number: EF534714.1.

[0118] By “fragment” is meant a portion of a polypeptide or nucleic acid molecule. This portion contains, at least about 10%, 20%, 30%, 40%, 50%, 60%, 70%, 80%, or 90% of the entire length of the reference nucleic acid molecule or polypeptide. A fragment may contain 10, 20, 30, 40, 50, 60, 70, 80, 90, or 100, 200, 300, 400, 500, 600, 700, 800, 900, or 1000 nucleotides or amino acids. In some embodiments, the fragment is a functional fragment.

[0119] In general, a “gene” is a polynucleotide that is capable of being transcribed to an RNA that either has a regulatory function, a catalytic function, and/or encodes a protein. In embodiments, the polynucleotide is in the genome of a cell. A eukaryotic gene typically has introns and exons, which may organize to produce different RNA splice variants that encode alternative versions of a mature protein. The skilled artisan will appreciate that the present disclosure encompasses all transcripts encoding a polypeptide of interest, including splice variants, allelic variants and transcripts that occur because of alternative promoter sites or alternative poly-adenylation sites. A “full-length” gene or RNA therefore encompasses any naturally occurring splice variants, allelic variants, other alternative transcripts, splice variants generated by recombinant technologies which bear the same function as the naturally occurring variants, and the resulting RNA molecules.

[0120] By “IKAROS family zinc finger 2 (IKZF2; helios) polypeptide” is meant a protein having at least about 85% amino acid sequence identity to GenBank Accession No. AAH28936.1, or a fragment thereof functioning as a transcription factor.

[0121] By “IKAROS family zinc finger 2 (IKZF2; helios) polynucleotide” is meant a nucleic acid molecule encoding a helios polypeptide, as well as the introns, exons, 3′ untranslated regions, 5′ untranslated regions, and regulatory sequences associated with its expression, or fragments thereof. In embodiments, a helios polynucleotide is the genomic sequence, cDNA, mRNA, or gene associated with and/or required for helios expression. An exemplary helios polynucleotide sequence from Homo sapiens is provided at Genbank Accession No. BC028936.1.

[0122] “Host versus graft disease” (HVGD) refers to a pathological condition where the immune system of a host generates an immune response against transplanted cells of a donor. By “guide polynucleotide” is meant a polynucleotide or polynucleotide complex which is specific for a target sequence and can form a complex with a polynucleotide programmable nucleotide binding domain protein (e.g., Cas9 or Cpf1). In an embodiment, the guide polynucleotide is a guide RNA (gRNA). gRNAs can exist as a complex of two or more RNAs, or as a single RNA molecule.

[0123] By “heterologous,” or “exogenous” is meant a polynucleotide or polypeptide that 1) has been experimentally incorporated to a polynucleotide or polypeptide sequence to which the polynucleotide or polypeptide is not normally found in nature; or 2) has been experimentally placed into a cell that does not normally comprise the polynucleotide or polypeptide. In some embodiments, “heterologous” means that a polynucleotide or polypeptide has been experimentally placed into a non-native context. In some embodiments, a heterologous polynucleotide or polypeptide is derived from a first species or host organism and is incorporated into a polynucleotide or polypeptide derived from a second species or host organism. In some embodiments, the first species or host organism is different from the second species or host organism. In some embodiments the heterologous polynucleotide is DNA. In some embodiments the heterologous polynucleotide is RNA.

[0124] By “Human Leukocyte Antigen-E (HLA-E) polypeptide” is meant a protein having at least about 85% amino acid sequence identity to NCBI Ref. Seq. Accession No. NP_005507.3, or a fragment thereof having immunomodulatory activity.

[0125] By “Human Leukocyte Antigen-E (HLA-E) polynucleotide” is meant a nucleic acid molecule encoding an HLA-E polypeptide, as well as the introns, exons, 3′ untranslated regions, 5′ untranslated regions, and regulatory sequences associated with its expression, or fragments thereof. In embodiments, an HLA-E polynucleotide is the genomic sequence, cDNA, mRNA, or gene associated with and/or required for HLA-E expression. An exemplary HLA-E polynucleotide sequence is provided at NCBI Ref. Seq. Accession No. NM_005516.6. The HLA-E gene corresponds to Ensembl: ENSG00000116815.

[0126] By “Human Leukocyte Antigen-G (HLA-G) polypeptide” is meant a protein having at least about 85% amino acid sequence identity to NCBI Ref. Seq. Accession No. NP_001350496.1, or a fragment thereof having immunomodulatory activity.

[0127] By “Human Leukocyte Antigen-G (HLA-G) polynucleotide” is meant a nucleic acid molecule encoding an HLA-G polypeptide, as well as the introns, exons, 3′ untranslated regions, 5′ untranslated regions, and regulatory sequences associated with its expression, or fragments thereof. In embodiments, an HLA-G polynucleotide is the genomic sequence, cDNA, mRNA, or gene associated with and/or required for HLA-G expression. An exemplary HLA-G polynucleotide sequence is provided at NCBI Ref. Seq. Accession No. NM_001363567.2. The HLA-G gene corresponds to Ensemble: ENSG00000230413, ENSG00000233095, ENSG00000237216, ENSG00000276051 and ENSG00000204632.

[0128] “Hybridization” means hydrogen bonding, which may be Watson-Crick, Hoogsteen or reversed Hoogsteen hydrogen bonding, between complementary nucleobases. For example, adenine and thymine are complementary nucleobases that pair through the formation of hydrogen bonds.

[0129] By “immune cell” is meant a cell of the immune system capable of generating or participating in an immune response. Exemplary immune cells include, but are not limited to, T cells, such as regulatory T (T_{REG}) cells or conventional T (T_{CONV}) cells. By “immune effector cell” is meant a lymphocyte, once activated, capable of modulating or effecting an immune response. In some embodiments, immune effector cells are T cells, such as regulatory T (T_{REG}) cells or conventional T (T_{CONV}) cells. In some embodiments, the immune effector cell has been genetically modified. In some embodiments, the effector T cells are thymocytes, immature T lymphocytes, mature T lymphocytes, resting T lymphocytes, or activated T lymphocytes. In embodiments, the effector cells are viable CD4+, CD25+, and CD127− cells (T_{REG}).

[0130] By “immune response regulation polypeptide” is meant a protein that modulates an immune response. An immune response regulation polypeptide may directly or indirectly modulate an immune response. For example, an immune response regulation polypeptide may increase or decrease the activation of an immune cell, e.g., a regulatory T (T_{REG}) cell or a conventional T (T_{CONV}) cell. An immune response regulation polypeptide may increase or decrease the activation threshold of an immune cell. In some embodiments, the immune response regulation polypeptide modulates a signal.

[0131] By “immune response regulation polynucleotide” or “immune response regulator polynucleotide” or “immune response regulation gene” is meant a nucleic acid molecule that encodes a polypeptide that modulates an immune response.

[0132] By “immunogen” is meant a polypeptide or fragment thereof capable of inducing an immune response. Exemplary immunogens include CD2, CD3e, CD3 delta, CD3 gamma, TRAC, TRBC1, TRBC2, CD4, CD5, CD7, CD8, CD19, CD23, CD27, CD28, CD30, CD33, CD52, CD58, CD70, CD127, CD122, CD130, CD132, CD38, CD69, CD11a, CD58, CD99, CD103, CCR4, CCR5, CCR6, CCR9, CCR10, CXCR3, CXCR4, CLA, CD161, PD-1, β2M, and CIITA polypeptides and antigenic fragments thereof.

[0133] By “immunogen encoding polynucleotide” is meant a nucleic acid molecule that encodes an immunogen.

[0134] By “increases” is meant a positive alteration of at least 10%, 25%, 50%, 75%, or 100%, or about 1.5-fold, about 2-fold, about 3-fold, about 4-fold, about 5-fold, about 6-fold, about 7-fold, about 8-fold, about 9-fold, about 10-fold, about 15-fold, about 20-fold, about 25-fold, about 30-fold, about 35-fold, about 40-fold, about 45-fold, about 50-fold, or about 100-fold.

[0135] The terms “inhibitor of base repair”, “base repair inhibitor”, “IBR” or their grammatical equivalents refer to a protein that is capable in inhibiting the activity of a nucleic acid repair enzyme, for example a base excision repair enzyme.

[0136] An “intein” is a fragment of a protein that is able to excise itself and join the remaining fragments (the exteins) with a peptide bond in a process known as protein splicing.

[0137] The terms “isolated,” “purified,” or “biologically pure” refer to material that is free to varying degrees from components which normally accompany it as found in its native state. “Isolate” denotes a degree of separation from original source or surroundings. “Purify” denotes a degree of separation that is higher than isolation. A “purified” or “biologically pure” protein is sufficiently free of other materials such that any impurities do not materially affect the biological properties of the protein or cause other adverse consequences. That is, a nucleic acid or peptide of the disclosure is purified if it is substantially free of cellular material, viral material, or culture medium when produced by recombinant DNA techniques, or chemical precursors or other chemicals when chemically synthesized. Purity and homogeneity are typically determined using analytical chemistry techniques, for example, polyacrylamide gel electrophoresis or high-performance liquid chromatography. The term “purified” can denote that a nucleic acid or protein gives rise to essentially one band in an electrophoretic gel. For a protein that can be subjected to modifications, for example, phosphorylation or glycosylation, different modifications may give rise to different isolated proteins, which can be separately purified.

[0138] By “isolated polynucleotide” is meant a nucleic acid (e.g., a DNA) that is free of the genes which, in the naturally occurring genome of the organism from which the nucleic acid molecule of the disclosure is derived, flank the gene. The term therefore includes, for example, a recombinant DNA that is incorporated into a vector; into an autonomously replicating plasmid or virus; or into the genomic DNA of a prokaryote or eukaryote; or that exists as a separate molecule (for example, a cDNA or a genomic or cDNA fragment produced by PCR or restriction endonuclease digestion) independent of other sequences. In addition, the term includes an RNA molecule that is transcribed from a DNA molecule, as well as a recombinant DNA that is part of a hybrid gene encoding additional polypeptide sequence.

[0139] By an “isolated polypeptide” is meant a polypeptide of the disclosure that has been separated from components that naturally accompany it. Typically, the polypeptide is isolated when it is at least 60%, by weight, free from the proteins and naturally occurring organic molecules with which it is naturally associated. In embodiments, the preparation is at least 75%, at least 90%, or at least 99%, by weight, a polypeptide of the disclosure. An isolated polypeptide of the disclosure may be obtained, for example, by extraction from a natural source, by expression of a recombinant nucleic acid encoding such a polypeptide; or by chemically synthesizing the protein. Purity can be measured by any appropriate method, for example, column chromatography, polyacrylamide gel electrophoresis, or by HPLC analysis.

[0140] By “c-JUN kinase 1 (JNK1) polypeptide” is meant a protein having at least about 85% amino acid sequence identity to Uniprot Accession No. P45983, which corresponds to SEQ ID NO: 977 (sp|P45983|MK08_HUMAN Mitogen-activated protein kinase 8 OS=Homo sapiens OX=9606 GN=MAPK8 PE=1 SV=2), or a fragment thereof and having kinase activity.

[0141] By “c-JUN kinase 1 (JNK1) polynucleotide” is meant a nucleic acid molecule encoding an JNK1 polypeptide, as well as the introns, exons, 3′ untranslated regions, 5′ untranslated regions, and regulatory sequences associated with its expression, or fragments thereof. In embodiments, a JNK1 polynucleotide is the genomic sequence, cDNA, mRNA, or gene associated with and/or required for JNK1 expression. An exemplary JNK1 polynucleotide sequence from Homo sapiens is provided at GenBank Accession No. BC144063.1, which corresponds to SEQ ID NO: 980 (BC144063.1:63-1217 Homo sapiens mitogen-activated protein kinase 8, mRNA (cDNA clone MGC:177600 IMAGE:9052583), complete cds) and at NCBI Ref. Seq. Accession No. NC_000010.11:48306673-48439360, which is provided in the Sequence Listing as SEQ ID NO: 979.

[0142] By “lineage stability” is meant the tendency of an immune cell to avoid differentiating into an alternative cell type. For example, a lineage stabilized regulatory T (T_{REG}) cell has a reduced tendency relative to a reference cell of differentiating into a Th1, Th2, or Th17 cell. In embodiments, the reference cell is an unmodified T_{REG} cell under substantially the same culture or in vivo conditions. In some instances, lineage stability of a T_{REG} cell can be measured using Foxp3 as a marker. For example, in some cases a lineage stabilized T_{REG} cell has higher levels of FoxP3 than a reference cell (e.g., an unmodified T_{REG} cell). In some cases, the FoxP3 expression is increased by at least 10%, 25%, 50%, 75%, or 100%, or about 1.5-fold, about 2-fold, about 3-fold, about 4-fold, about 5-fold, about 6-fold, about 7-fold, about 8-fold, about 9-fold, about 10-fold, about 15-fold, about 20-fold, about 25-fold, about 30-fold, about 35-fold, about 40-fold, about 45-fold, about 50-fold, or about 100-fold. In various embodiments, a lineage stabilized T_{REG} cell has been modified to reduce expression of SIRT1 or RNF20 and increase levels of FoxP3 relative to a reference cell. In some cases, the SIRT1 and/or RNF20 expression is reduced by 10%, 25%, 50%, 75%, or 100%.

[0143] The term “linker”, as used herein, refers to a molecule that links two moieties. In one embodiment, the term “linker” refers to a covalent linker (e.g., covalent bond) or a non-covalent linker. The linker can be a peptide or a non-peptide linker. For example, the linker can be an XTEN, (GGGS)ₙ (SEQ ID NO: 246), (GGGGS)ₙ (SEQ ID NO: 247), (G)ₙ, (EAAAK)n (SEQ ID NO: 248), (GGS)ₙ, SGSETPGTSESATPES (SEQ ID NO: 249).

[0144] By “major histocompatibility complex, class I, A (HLA-A) polypeptide” is meant a protein having at least about 85% amino acid sequence identity to GenBank. Accession No. BAA07530.1, or a fragment thereof having immunomodulatory activity.

[0145] By “major histocompatibility complex, class I, A (HLA-A) polynucleotide” is meant a nucleic acid molecule encoding an HLA-A polypeptide, as well as the introns, exons, 3′ untranslated regions, 5′ untranslated regions, and regulatory sequences associated with its expression, or fragments thereof. In embodiments, an HLA-A polynucleotide is the genomic sequence, cDNA, mRNA, or gene associated with and/or required for HLA-A expression. An exemplary HLA-A polynucleotide sequence is provided at GenBank Accession No. D38525.1. The HLA-A gene corresponds to Ensemble ENSG00000206503.

[0146] By “major histocompatibility complex, class I, B (HLA-B) polypeptide” is meant a protein having at least about 85% amino acid sequence identity to GenBank Accession No. CAD30340.1, or a fragment thereof having immunomodulatory activity.

[0147] By “major histocompatibility complex, class I, B (HLA-B) polynucleotide” is meant a nucleic acid molecule encoding an HLA-B polypeptide, as well as the introns, exons, 3′ untranslated regions, 5′ untranslated regions, and regulatory sequences associated with its expression, or fragments thereof. In embodiments, an HLA-B polynucleotide is the genomic sequence, cDNA, mRNA, or gene associated with and/or required for HLA-B expression. An exemplary HLA-B polynucleotide sequence is provided at GenBank Accession No. AJ458992.1. The HLA-B gene corresponds to Ensembl: ENSG00000234745.

[0148] By “major histocompatibility complex, class I, C (HLA-C) polypeptide” is meant a protein having at least about 85% amino acid sequence identity to GenBank. Accession No. BB094058.1, or a fragment thereof having immunomodulatory activity.

[0149] By “major histocompatibility complex, class I, C (HLA-C) polynucleotide” is meant a nucleic acid molecule encoding an HLA-C polypeptide, as well as the introns, exons, 3′ untranslated regions, 5′ untranslated regions, and regulatory sequences associated with its expression, or fragments thereof. In embodiments, an HLA-C polynucleotide is the genomic sequence, cDNA, mRNA, or gene associated with and/or required for HLA-C expression. An exemplary HLA-C polynucleotide sequence is provided at GenBank Accession No. LC508210.1. The HLA-C gene corresponds to Ensembl: ENSG00000204525.

[0150] By “MHC class I polypeptide-related sequence A (MICA) polypeptide” is meant a protein having at least about 85% amino acid sequence identity to GenBank Accession No. AAA21718.1, or a fragment thereof having immunomodulatory activity.

[0151] By “MHC class I polypeptide-related sequence A (MICA) polynucleotide” is meant a nucleic acid molecule encoding a MICA polypeptide, as well as the introns, exons, 3′ untranslated regions, 5′ untranslated regions, and regulatory sequences associated with its expression, or fragments thereof. In embodiments, a MICA polynucleotide is the genomic sequence, cDNA, mRNA, or gene associated with and/or required for MICA expression. An exemplary MICA polynucleotide sequence is provided at GenBank Accession No. L14848.1. The MICA gene corresponds to Ensembl: ENSG00000204520.

[0152] By “MHC class I polypeptide-related sequence B (MICB) polypeptide” is meant a protein having at least about 85% amino acid sequence identity to NCBI Ref. Seq. Accession No. NP_005922.2, or a fragment thereof having immunomodulatory activity.

[0153] By “MHC class I polypeptide-related sequence B (MICB) polynucleotide” is meant a nucleic acid molecule encoding an MICB polypeptide, as well as the introns, exons, 3′ untranslated regions, 5′ untranslated regions, and regulatory sequences associated with its expression, or fragments thereof. In embodiments, a MICB polynucleotide is the genomic sequence, cDNA, mRNA, or gene associated with and/or required for MICB expression. An exemplary MICB polynucleotide sequence is provided at NCBI Ref. Seq. Accession No. NM_005931.5. The MICB gene corresponds to Ensembl: ENSG00000204516.

[0154] By “marker” is meant any protein or polynucleotide having an alteration in expression, level, structure, or activity that is associated with a disease or disorder. In embodiments, the disease is graft versus host disease (GVHD).

[0155] The term “mutation,” as used herein, refers to a substitution of a residue within a sequence, e.g., a nucleic acid or amino acid sequence, with another residue, or a deletion or insertion of one or more residues within a sequence. Mutations are typically described herein by identifying the original residue followed by the position of the residue within the sequence and by the identity of the newly substituted residue. Various methods for making the amino acid substitutions (mutations) provided herein are well known in the art, and are provided by, for example, Green and Sambrook, Molecular Cloning: A Laboratory Manual (4^{th} ed., Cold Spring Harbor Laboratory Press, Cold Spring Harbor, N.Y. (2012)).

[0156] By “nectin cell adhesion molecule 2 (Nectin-2) polypeptide” is meant a protein having at least about 85% amino acid sequence identity to NCBI Ref. Seq. Accession No. NP_001036189.1, or a fragment thereof having immunomodulatory activity.

[0157] By “nectin cell adhesion molecule 2 (Nectin-2) polynucleotide” is meant a nucleic acid molecule encoding a Nectin-2 polypeptide, as well as the introns, exons, 3′ untranslated regions, 5′ untranslated regions, and regulatory sequences associated with its expression, or fragments thereof. In embodiments, a Nectin-2 polynucleotide is the genomic sequence, cDNA, mRNA, or gene associated with and/or required for Nectin-2 expression. An exemplary Nectin-2 polynucleotide sequence is provided at NCBI Ref. Seq. Accession No. NP_001036189.1. The Nectin-2 gene corresponds to Ensembl: ENSG00000130202.10.

[0158] By “NLR family CARD domain containing 5 (class-I transcriptional activator) (NLRC5 (CITA)) polypeptide” is meant a protein having at least about 85% amino acid sequence identity to NCBI Ref. Seq. Accession No. NP_115582.4, or a fragment thereof having immunomodulatory activity.

[0159] By “NLR family CARD domain containing 5 (class-I transcriptional activator) (NLRC5 (CITA)) polynucleotide” is meant a nucleic acid molecule encoding an NLRC5 polypeptide, as well as the introns, exons, 3′ untranslated regions, 5′ untranslated regions, and regulatory sequences associated with its expression, or fragments thereof. In embodiments, a NLRC5 polynucleotide is the genomic sequence, cDNA, mRNA, or gene associated with and/or required for NLRC5 expression. An exemplary NLRC5 polynucleotide sequence is provided at NCBI Ref. Seq. Accession No. NM_032206.5. The NLRC5 gene corresponds to Ensembl: ENST00000539144.5.

[0160] By “Nerve growth factor receptor (NGFR) polypeptide” is meant a protein having at least about 85% amino acid sequence identity to GenBank Accession No. AAB59544.1 or a fragment thereof that is capable of binding a neutrophin.

[0161] By “Nerve growth factor receptor (NGFR) polynucleotide” is meant a nucleic acid molecule encoding an NGFR polypeptide, as well as the introns, exons, 3′ untranslated regions, 5′ untranslated regions, and regulatory sequences associated with its expression, or fragments thereof. In embodiments, a NGFR polynucleotide is the genomic sequence, cDNA, mRNA, or gene associated with and/or required for NGFR expression. An exemplary NGFR polynucleotide sequence from Homo sapiens is provided at GenBank Accession No. M14764.1

[0162] The terms “nucleic acid” and “nucleic acid molecule,” as used herein, refer to a compound comprising a nucleobase and an acidic moiety, e.g., a nucleoside, a nucleotide, or a polymer of nucleotides. Typically, polymeric nucleic acids, e.g., nucleic acid molecules comprising three or more nucleotides are linear molecules, in which adjacent nucleotides are linked to each other via a phosphodiester linkage. In some embodiments, “nucleic acid” refers to individual nucleic acid residues (e.g., nucleotides and/or nucleosides). In some embodiments, “nucleic acid” refers to an oligonucleotide chain comprising three or more individual nucleotide residues. As used herein, the terms “oligonucleotide” and “polynucleotide” can be used interchangeably to refer to a polymer of nucleotides (e.g., a string of at least three nucleotides). In some instances, a DNA polynucleotide is contained within the genome of a cell and may, therefore, be referred to as “genomic DNA.” In some embodiments, “nucleic acid” encompasses RNA as well as single and/or double-stranded DNA. Nucleic acids may be naturally occurring, for example, in the context of a genome, a transcript, an mRNA, tRNA, rRNA, siRNA, snRNA, a plasmid, cosmid, chromosome, chromatid, or other naturally occurring nucleic acid molecule. On the other hand, a nucleic acid molecule may be a non-naturally occurring molecule, e.g., a recombinant DNA or RNA, an artificial chromosome, an engineered genome, or fragment thereof, or a synthetic DNA, RNA, DNA/RNA hybrid, or including non-naturally occurring nucleotides or nucleosides. Furthermore, the terms “nucleic acid,” “DNA,” “RNA,” and/or similar terms include nucleic acid analogs, e.g., analogs having other than a phosphodiester backbone. Nucleic acids can be purified from natural sources, produced using recombinant expression systems and optionally purified, chemically synthesized, etc. Where appropriate, e.g., in the case of chemically synthesized molecules, nucleic acids comprise nucleoside analogs such as analogs having chemically modified bases or sugars, and backbone modifications. A nucleic acid sequence is presented in the 5′ to 3′ direction unless otherwise indicated. In some embodiments, a nucleic acid is or comprises natural nucleosides (e.g. adenosine, thymidine, guanosine, cytidine, uridine, deoxyadenosine, deoxythymidine, deoxyguanosine, and deoxycytidine); nucleoside analogs (e.g., 2-aminoadenosine, 2-thiothymidine, inosine, pyrrolo-pyrimidine, 3-methyl adenosine, 5-methylcytidine, 2-aminoadenosine, C5-bromouridine, C5-fluorouridine, C5-iodouridine, C5-propynyl-uridine, C5-propynyl-cytidine, C5-methylcytidine, 2-aminoadenosine, 7-deazaadenosine, 7-deazaguanosine, 8-oxoadenosine, 8-oxoguanosine, 0(6)-methylguanine, and 2-thiocytidine); chemically modified bases; biologically modified bases (e.g., methylated bases); intercalated bases; modified sugars (2′—e.g., fluororibose, ribose, 2′-deoxyribose, arabinose, and hexose); and/or modified phosphate groups (e.g., phosphorothioates and 5′-N-phosphoramidite linkages).

[0163] The term “nuclear localization sequence,” “nuclear localization signal,” or “NLS” refers to an amino acid sequence that promotes import of a protein into the cell nucleus. Nuclear localization sequences are known in the art and described, for example, in Plank et al., International PCT application, PCT/EP2000/011690, filed Nov. 23, 2000, published as WO/2001/038547 on May 31, 2001, the contents of which are incorporated herein by reference for their disclosure of exemplary nuclear localization sequences. In other embodiments, the NLS is an optimized NLS described, for example, by Koblan et al., Nature Biotech. 2018 doi:10.1038/nbt.4172. In some embodiments, an NLS comprises the amino acid sequence KRTADGSEFESPKKKRKV (SEQ ID NO: 190), KRPAATKKAGQAKKKK (SEQ ID NO: 191), KKTELQTTNAENKTKKL (SEQ ID NO: 192), KRGINDRNFWRGENGRKTR (SEQ ID NO: 193), RKSGKIAAIVVKRPRK (SEQ ID NO: 194), PKKKRKV (SEQ ID NO: 195), MDSLLMNRRKFLYQFKNVRWAKGRRETYLC (SEQ ID NO: 196), PKKKRKVEGADKRTADGSE FES PKKKRKV (SEQ ID NO: 328), RKSGKIAAIVVKRPRKPKKKRKV (SEQ ID NO: 329), or MDSLLMNRRKFLYQFKNVRWAKGRRETYLC (SEQ ID NO: 196).

[0164] The term “nucleobase,” “nitrogenous base,” or “base,” used interchangeably herein, refers to a nitrogen-containing biological compound that forms a nucleoside, which in turn is a component of a nucleotide. The ability of nucleobases to form base pairs and to stack one upon another leads directly to long-chain helical structures such as ribonucleic acid (RNA) and deoxyribonucleic acid (DNA). Five nucleobases—adenine (A), cytosine (C), guanine (G), thymine (T), and uracil (U)—are called primary or canonical. Adenine and guanine are derived from purine, and cytosine, uracil, and thymine are derived from pyrimidine. DNA and RNA can also contain other (non-primary) bases that are modified. Non-limiting exemplary modified nucleobases can include hypoxanthine, xanthine, 7-methylguanine, 5,6-dihydrouracil, 5-methylcytosine (m5C), and 5-hydromethylcytosine. Hypoxanthine and xanthine can be created through mutagen presence, both of them through deamination (replacement of the amine group with a carbonyl group). Hypoxanthine can be modified from adenine. Xanthine can be modified from guanine. Uracil can result from deamination of cytosine. A “nucleoside” consists of a nucleobase and a five-carbon sugar (either ribose or deoxyribose). Examples of a nucleoside include adenosine, guanosine, uridine, cytidine, 5-methyluridine (m5U), deoxyadenosine, deoxyguanosine, thymidine, deoxyuridine, and deoxycytidine. Examples of a nucleoside with a modified nucleobase includes inosine (I), xanthosine (X), 7-methylguanosine (m7G), dihydrouridine (D), 5-methylcytidine (m5C), and pseudouridine (Ψ). A “nucleotide” consists of a nucleobase, a five-carbon sugar (either ribose or deoxyribose), and at least one phosphate group. Non-limiting examples of modified nucleobases and/or chemical modifications that a modified nucleobase may include are the following: pseudo-uridine, 5-Methyl-cytosine, 2′-O-methyl-3′-phosphonoacetate, 2′-O-methyl thioPACE (MSP), 2′-O-methyl-PACE (MP), 2′-fluoro RNA (2′-F-RNA), constrained ethyl (S-cEt), 2′-O-methyl (‘M’), 2′-O-methyl-3′-phosphorothioate (‘MS’), 2′-O-methyl-3′-thiophosphonoacetate (‘MSP’), 5-methoxyuridine, phosphorothioate, and N1-Methylpseudouridine.

[0165] The term “nucleic acid programmable DNA binding protein” or “napDNAbp” may be used interchangeably with “polynucleotide programmable nucleotide binding domain” to refer to a protein that associates with a nucleic acid (e.g., DNA or RNA), such as a guide nucleic acid or guide polynucleotide (e.g., gRNA), that guides the napDNAbp to a specific nucleic acid sequence. In some embodiments, the polynucleotide programmable nucleotide binding domain is a polynucleotide programmable DNA binding domain. In some embodiments, the polynucleotide programmable nucleotide binding domain is a polynucleotide programmable RNA binding domain. In some embodiments, the polynucleotide programmable nucleotide binding domain is a Cas9 protein. A Cas9 protein can associate with a guide RNA that guides the Cas9 protein to a specific DNA sequence that is complementary to the guide RNA. In some embodiments, the napDNAbp is a Cas9 domain, for example a nuclease active Cas9, a Cas9 nickase (nCas9), or a nuclease inactive Cas9 (dCas9). Non-limiting examples of nucleic acid programmable DNA binding proteins include, Cas9 (e.g., dCas9 and nCas9), Cas12a/Cpf1, Cas12b/C2c1, Cas12c/C2c3, Cas12d/CasY, Cas12e/CasX, Cas12g, Cas12h, Cas12i, and Cas12j/CasΦ (Cas12j/Casphi). Non-limiting examples of Cas enzymes include Cas1, Cas1B, Cas2, Cas3, Cas4, Cas5, Cas5d, Cas5t, Cas5h, Cas5a, Cas6, Cas7, Cas8, Cas8a, Cas8b, Cas8c, Cas9 (also known as Csn1 or Csx12), Cas10, Cas10d, Cas12a/Cpf1, Cas12b/C2c1, Cas12c/C2c3, Cas12d/CasY, Cas12e/CasX, Cas12g, Cas12h, Cas12i, Cas12j/CasD, Cpf1, Csy1, Csy2, Csy3, Csy4, Cse1, Cse2, Cse3, Cse4, Cse5e, Csc1, Csc2, Csa5, Csn1, Csn2, Csm1, Csm2, Csm3, Csm4, Csm5, Csm6, Cmr1, Cmr3, Cmr4, Cmr5, Cmr6, Csb1, Csb2, Csb3, Csx17, Csx14, Csx10, Csx16, CsaX, Csx3, Csx1, Csx1S, Csx11, Csf1, Csf2, CsO, Csf4, Csd1, Csd2, Cst1, Cst2, Csh1, Csh2, Csa1, Csa2, Csa3, Csa4, Csa5, Type II Cas effector proteins, Type V Cas effector proteins, Type VI Cas effector proteins, CARF, DinG, homologues thereof, or modified or engineered versions thereof. Other nucleic acid programmable DNA binding proteins are also within the scope of this disclosure, although they may not be specifically listed in this disclosure. See, e.g., Makarova et al. “Classification and Nomenclature of CRISPR-Cas Systems: Where from Here?” CRISPR J. 2018 October; 1:325-336. doi: 10.1089/crispr.2018.0033; Yan et al., “Functionally diverse type V CRISPR-Cas systems” Science. 2019 Jan. 4; 363(6422):88-91. doi: 10.1126/science.aav7271, the entire contents of each are hereby incorporated by reference. Exemplary nucleic acid programmable DNA binding proteins and nucleic acid sequences encoding nucleic acid programmable DNA binding proteins are provided in the Sequence Listing as SEQ ID NOs: 197-230, and 378.

[0166] The terms “nucleobase editing domain” or “nucleobase editing protein,” as used herein, refers to a protein or enzyme that can catalyze a nucleobase modification in RNA or DNA, such as cytosine (or cytidine) to uracil (or uridine) or thymine (or thymidine), and adenine (or adenosine) to hypoxanthine (or inosine) deaminations, as well as non-templated nucleotide additions and insertions. In some embodiments, the nucleobase editing domain is a deaminase domain (e.g., an adenine deaminase or an adenosine deaminase; or a cytidine deaminase or a cytosine deaminase).

[0167] As used herein, “obtaining” as in “obtaining an agent” includes synthesizing, purchasing, or otherwise acquiring the agent.

[0168] By “subject” or “patient” is meant a mammal, including, but not limited to, a human or non-human mammal. In embodiments, the mammal is a bovine, equine, canine, ovine, rabbit, rodent, nonhuman primate, or feline. In an embodiment, “patient” refers to a mammalian subject with a higher-than-average likelihood of developing a disease or a disorder. Exemplary patients can be humans, non-human primates, cats, dogs, pigs, cattle, cats, horses, camels, llamas, goats, sheep, rodents (e.g., mice, rabbits, rats, or guinea pigs) and other mammalians that can benefit from the therapies disclosed herein. Exemplary human patients can be male and/or female. “Patient in need thereof” or “subject in need thereof” is referred to herein as a patient diagnosed with, at risk or having, predetermined to have, or suspected of having a disease or disorder.

[0169] The terms “pathogenic mutation”, “pathogenic variant”, “disease causing mutation”, “disease causing variant”, “deleterious mutation”, or “predisposing mutation” refers to a genetic alteration or mutation that is associated with a disease or disorder or that increases an individual's susceptibility or predisposition to a certain disease or disorder. In some embodiments, the pathogenic mutation comprises at least one wild-type amino acid substituted by at least one pathogenic amino acid in a protein encoded by a gene. In some embodiments, the pathogenic mutation is in a terminating region (e.g., stop codon). In some embodiments, the pathogenic mutation is in a non-coding region (e.g., intron, promoter, etc.).

[0170] By “Programmed cell death 1 (PDCD1; PD-1, PD1) polypeptide” is meant a protein having at least about 85% amino acid sequence identity to GenBank Accession No. AA063583.1, which corresponds to SEQ ID NO. 982 (AA063583.1 programmed cell death 1 [Homo sapiens]), or a fragment thereof having immunomodulatory activity.

[0171] By “Programmed cell death 1 (PDCD1; PD-1) polynucleotide” is meant a nucleic acid molecule encoding an PDCD1 polypeptide, as well as the introns, exons, 3′ untranslated regions, 5′ untranslated regions, and regulatory sequences associated with its expression, or fragments thereof. In embodiments, a PDCD1 polynucleotide is the genomic sequence, cDNA, mRNA, or gene associated with and/or required for PDCD1 expression. An exemplary PDCD1 polynucleotide sequence from Homo sapiens is provided at GenBank Accession No. AY238517.1, which corresponds to SEQ ID NO: 983 (AY238517.1 Homo sapiens programmed cell death 1 (PDCD1) mRNA, complete cds), and at NCBI Ref. Seq. NC_000002.12:c241858908-241849881, which is provided in the Sequence Listing as SEQ ID NO: 981.

[0172] By “Programmed Cell Death-Ligand 1 (PD-L1)” is meant a protein having at least about 85% amino acid sequence identity to NCBI Accession No. NP_054862.1, or a fragment thereof capable of modulating an immune response.

[0173] By “Programmed Cell Death-Ligand 1 (PD-L1)” is meant a nucleic acid molecule encoding an PD-L1 polypeptide, as well as the introns, exons, 3′ untranslated regions, 5′ untranslated regions, and regulatory sequences associated with its expression, or fragments thereof. An exemplary PD-L1 polynucleotide is provided at NCBI Accession No. NM_014143.4. The PD-L1 gene corresponds to Ensembl: ENSG00000120217. By “Protein kinase C theta (PRKCQ) polypeptide” is meant a protein or fragment thereof having at least about 85% amino acid sequence identity to GenBank Accession No. AAI13360.1, which corresponds to SEQ ID NO: 984 (AAI13360.1 Protein kinase C, theta [Homo sapiens]), having kinase activity.

[0174] By “Protein kinase C theta (PRKCQ) polynucleotide” is meant a nucleic acid molecule encoding an PRKCQ polypeptide, as well as the introns, exons, 3′ untranslated regions, 5′ untranslated regions, and regulatory sequences associated with its expression, or fragments thereof. In embodiments, a PRKCQ polynucleotide is the genomic sequence, cDNA, mRNA, or gene associated with and/or required for PRKCQ expression. An exemplary PRKCQ polynucleotide sequence from Homo sapiens is provided at GenBank Accession No. BC113359.1, which corresponds to SEQ ID NO: 986 (BC113359.1:20-2140 Homo sapiens protein kinase C, theta, mRNA (cDNA clone MGC:141919 IMAGE:8322411), complete cds), and at NCBI Ref. Seq. NC_000010.11:c6580646-6393038, which is provided in the Sequence Listing as SEQ ID NO: 985.

[0175] The terms “protein”, “peptide”, “polypeptide”, and their grammatical equivalents are used interchangeably herein, and refer to a polymer of amino acid residues linked together by peptide (amide) bonds. A protein, peptide, or polypeptide can be naturally occurring, recombinant, or synthetic, or any combination thereof.

[0176] The term “fusion protein” as used herein refers to a hybrid polypeptide which comprises protein domains from at least two different proteins.

[0177] By “rBE4 polypeptide” is meant a polypeptide sharing at least 85% amino acid sequence identity to SEQ ID NO. 987 and having cytidine base editor activity.

[0178] By “rBE4 polynucleotide” is meant a polynucleotide encoding a rBE4 polypeptide.

[0179] The term “recombinant” as used herein in the context of proteins or nucleic acids refers to proteins or nucleic acids that do not occur in nature but are the product of human engineering. For example, in some embodiments, a recombinant protein or nucleic acid molecule comprises an amino acid or nucleotide sequence that comprises at least one, at least two, at least three, at least four, at least five, at least six, or at least seven mutations as compared to any naturally occurring sequence.

[0180] By “reduces” is meant a negative alteration of at least 10%, 25%, 50%, 75%, or 100%. In embodiments, a reduction in is measured as a percent of expression or activity relative to a reference cell (e.g., an unmodified immune cell under substantially the same conditions). In embodiments, the reduced expression or activity is about, or less than about 0.001%, 0.01%, 0.1%, 1%, 2%, 3%, 4%, 5%, 10%, 15%, 20%, 25%, 30%, 35%, 40%, 45%, 50%, 55%, 60%, 65%, 70%, 75%, 80%, 85%, 90%, or 95% of that relative to that in a reference cell. In embodiments, the reduced expression or activity is greater than about 0.001%, 0.01%, 0.1%, 1%, 2%, 3%, 4%, 5%, 10%, 15%, 20%, 25%, 30%, 35%, 40%, 45%, 50%, 55%, 60%, 65%, 70%, 75%, 80%, 85%, 90%, or 95% of that relative to that in a reference cell.

[0181] By “reference” is meant a standard or control condition. In one embodiment, the reference is a wild-type or healthy cell (e.g., immune cell, such as a T_{REG} cell). In one embodiment, the reference is an unedited cell (e.g., an immune cell, such as a T_{REG} cell). In embodiments, the reference cell is an unmodified T_{REG} cell under substantially the same culture or in vivo conditions. In other embodiments and without limitation, a reference is an untreated cell that is not subjected to a test condition, or is subjected to placebo or normal saline, medium, buffer, and/or a control vector that does not harbor a polynucleotide of interest.

[0182] A “reference sequence” is a defined sequence used as a basis for sequence comparison. A reference sequence may be a subset of or the entirety of a specified sequence, for example, a segment of a full-length cDNA or gene sequence, or the complete cDNA or gene sequence. For polypeptides, the length of the reference polypeptide sequence will generally be at least about 16 amino acids, at least about 20 amino acids, at least about 25 amino acids, about 35 amino acids, about 50 amino acids, or about 100 amino acids. For nucleic acids, the length of the reference nucleic acid sequence will generally be at least about 50 nucleotides, at least about 60 nucleotides, at least about 75 nucleotides, about 100 nucleotides or about 300 nucleotides or any integer thereabout or therebetween. In some embodiments, a reference sequence is a wild-type sequence of a protein of interest. In other embodiments, a reference sequence is a polynucleotide sequence encoding a wild-type protein.

[0183] The term “RNA-programmable nuclease,” and “RNA-guided nuclease” refer to a nuclease that forms a complex with (e.g., binds or associates with) one or more RNA(s) that is not a target for cleavage. In some embodiments, an RNA-programmable nuclease, when in a complex with an RNA, may be referred to as a nuclease: RNA complex. Typically, the bound RNA(s) is referred to as a guide RNA (gRNA). In some embodiments, the RNA-programmable nuclease is the (CRISPR-associated system) Cas9 endonuclease, for example, Cas9 (Csn1) from Streptococcus pyogenes (e.g., SEQ ID NO: 197), Cas9 from Neisseria meningitidis (NmeCas9; SEQ ID NO: 208), Nme2Cas9 (SEQ ID NO: 209), Streptococcus constellatus (ScoCas9) or derivatives thereof (e.g., a sequence with at least about 85% sequence identity to a Cas9, such as Nme2Cas9 or spCas9).

[0184] By “Ring finger protein 20 (RNF20) polypeptide” is meant a protein or fragment thereof having at least about 85% amino acid sequence identity to GenBank Accession No. AA152310.1, which corresponds to SEQ ID NO: 988 (AA152310.1 Ring finger protein 20 [Homo sapiens]), and having ubiquitin ligase activity. RNF20 is a modulator of FoxP3 expression acting as a negative regulator of FoxP3. RNF20 is an E3 ubiquitin ligase. By “Ring finger protein 20 (RNF20) polynucleotide” is meant a nucleic acid molecule encoding an RNF20 polypeptide, as well as the introns, exons, 3′ untranslated regions, 5′ untranslated regions, and regulatory sequences associated with its expression, or fragments thereof. In embodiments, a RNF20 polynucleotide is the genomic sequence, cDNA, mRNA, or gene associated with and/or required for RNF20 expression. An exemplary RNF20 polynucleotide sequence from Homo sapiens is provided at GenBank Accession No. BC152309.1, which corresponds to SEQ ID NO: 990 (BC152309.1:86-3013 Homo sapiens ring finger protein 20, mRNA (cDNA clone MGC:133065 IMAGE:40009034), complete cds), and at NCBI Ref. Seq. NG_047002.1, which is provided in the Sequence Listing as SEQ ID NO: 989.

[0185] As used herein, the term “scFv” refers to a single chain Fv antibody in which the variable domains of the heavy chain and the light chain from an antibody have been joined to form one chain. scFv fragments contain a single polypeptide chain that includes the variable region of an antibody light chain (VL) (e.g., CDR-L1, CDR-L2, and/or CDR-L3) and the variable region of an antibody heavy chain (VH) (e.g., CDR-H1, CDR-H2, and/or CDR-H3) separated by a linker. The linker that joins the VL and VH regions of a scFv fragment can be a peptide linker composed of proteinogenic amino acids. Alternative linkers can be used to so as to increase the resistance of the scFv fragment to proteolytic degradation (for example, linkers containing D-amino acids), in order to enhance the solubility of the scFv fragment (for example, hydrophilic linkers such as polyethylene glycol-containing linkers or polypeptides containing repeating glycine and serine residues), to improve the biophysical stability of the molecule (for example, a linker containing cysteine residues that form intramolecular or intermolecular disulfide bonds), or to attenuate the immunogenicity of the scFv fragment (for example, linkers containing glycosylation sites). It will also be understood by one of ordinary skill in the art that the variable regions of the scFv molecules described herein can be modified such that they vary in amino acid sequence from the antibody molecule from which they were derived. For example, nucleotide or amino acid substitutions leading to conservative substitutions or changes at amino acid residues can be made (e.g., in CDR and/or framework residues) so as to preserve or enhance the ability of the scFv to bind to the antigen recognized by the corresponding antibody.

[0186] The term “single nucleotide polymorphism (SNP)” is a variation in a single nucleotide that occurs at a specific position in the genome, where each variation is present to some appreciable degree within a population (e.g., >1%). SNPs can fall within coding regions of genes, non-coding regions of genes, or in the intergenic regions (regions between genes). In some embodiments, SNPs within a coding sequence do not necessarily change the amino acid sequence of the protein that is produced, due to degeneracy of the genetic code. SNPs in the coding region are of two types: synonymous and nonsynonymous SNPs. Synonymous SNPs do not affect the protein sequence, while nonsynonymous SNPs change the amino acid sequence of protein. The nonsynonymous SNPs are of two types: missense and nonsense. SNPs that are not in protein-coding regions can still affect gene splicing, transcription factor binding, messenger RNA degradation, or the sequence of noncoding RNA. Gene expression affected by this type of SNP is referred to as an eSNP (expression SNP) and can be upstream or downstream from the gene. A single nucleotide variant (SNV) is a variation in a single nucleotide without any limitations of frequency and can arise in somatic cells. A somatic single nucleotide variation can also be called a single-nucleotide alteration.

[0187] By “specifically binds” is meant a nucleic acid molecule, polypeptide, polypeptide/polynucleotide complex, compound, or molecule that recognizes and binds a polypeptide and/or nucleic acid molecule of the disclosure, but which does not substantially recognize and bind other molecules in a sample, for example, a biological sample.

[0188] By “Sirtuin 1 (SIRT1) polypeptide” is meant a protein having at least about 85% amino acid sequence identity to GenBank Accession No. AAH12499.1, which corresponds to SEQ ID NO: 991 (AAH12499.1 SIRT1 protein [Homo sapiens]), or a fragment thereof having nicotinamide adenine dinucleotide-dependent histone deacetylase activity. SIRT1 targets histone and non-histone proteins and can function as a transcription factor.

[0189] By “Sirtuin 1 (SIRT1) polynucleotide” is meant a nucleic acid molecule encoding an SIRT1 polypeptide, as well as the introns, exons, 3′ untranslated regions, 5′ untranslated regions, and regulatory sequences associated with its expression, or fragments thereof. In embodiments, a SIRT1 polynucleotide is the genomic sequence, cDNA, mRNA, or gene associated with and/or required for SIRT1 expression. An exemplary SIRT1 polynucleotide sequence from Homo sapiens is provided at GenBank Accession No. BC012499.1, which corresponds to SEQ ID NO: 993 (BC012499.1:210-1877 Homo sapiens sirtuin (silent mating type information regulation 2 homolog) 1 (S. cerevisiae), mRNA (cDNA clone MGC:21066 IMAGE:4518906), complete cds), and at NCBI Ref. Seq. NC_000010.11:67884656-67918390, which is provided in the Sequence Listing as SEQ ID NO: 992.

[0190] By “substantially identical” is meant a polypeptide or nucleic acid molecule exhibiting at least 50% identity to a reference amino acid sequence. In one embodiment, a reference sequence is a wild-type amino acid or nucleic acid sequence. In another embodiment, a reference sequence is any one of the amino acid or nucleic acid sequences described herein. In one embodiment, such a sequence is at least about 60%, 80%, 85%, 90%, 95%, 96%, 97%, 98%, 99%, 99.9%, or even 99.99%, identical at the amino acid level or nucleic acid level to the sequence used for comparison.

[0191] Sequence identity is typically measured using sequence analysis software (for example, Sequence Analysis Software Package of the Genetics Computer Group, University of Wisconsin Biotechnology Center, 1710 University Avenue, Madison, Wis. 53705, BLAST, BESTFIT, GAP, or PILEUP/PRETTYBOX programs). Such software matches identical or similar sequences by assigning degrees of homology to various substitutions, deletions, and/or other modifications. Conservative substitutions typically include substitutions within the following groups: glycine, alanine; valine, isoleucine, leucine; aspartic acid, glutamic acid, asparagine, glutamine; serine, threonine; lysine, arginine; and phenylalanine, tyrosine.

[0192] Nucleic acid molecules useful in the methods of the disclosure include any nucleic acid molecule that encodes a polypeptide of the disclosure or a functional fragment thereof. Such nucleic acid molecules need not be 100% identical with an endogenous nucleic acid sequence but will typically exhibit substantial identity. Polynucleotides having “substantial identity” to an endogenous sequence are typically capable of hybridizing with at least one strand of a double-stranded nucleic acid molecule. Nucleic acid molecules useful in the methods of the disclosure include any nucleic acid molecule that encodes a polypeptide of the disclosure or a functional fragment thereof. Such nucleic acid molecules need not be 100% identical with an endogenous nucleic acid sequence but will typically exhibit substantial identity. Polynucleotides having “substantial identity” to an endogenous sequence are typically capable of hybridizing with at least one strand of a double-stranded nucleic acid molecule. By “hybridize” is meant pair to form a double-stranded molecule between complementary polynucleotide sequences (e.g., a gene described herein), or portions thereof, under various conditions of stringency. (See, e.g., Wahl, G. M. and S. L. Berger (1987) Methods Enzymol. 152:399; Kimmel, A. R. (1987) Methods Enzymol. 152:507).

[0193] By “split” is meant divided into two or more fragments.

[0194] A “split polypeptide” or “split protein” refers to a protein that is provided as an N-terminal fragment and a C-terminal fragment translated as two separate polypeptides from a nucleotide sequence(s). The polypeptides corresponding to the N-terminal portion and the C-terminal portion of the split protein may be spliced in some embodiments to form a “reconstituted” protein. In embodiments, the split polypeptide is a nucleic acid programmable DNA binding protein (e.g. a Cas9) or a base editor.

[0195] By “TAP-associated glycoprotein (Tapasin; TAPBP) polypeptide” is meant a protein having at least about 85% amino acid sequence identity to NCBI Ref. Seq. Accession No. NP_003181.3, or a fragment thereof having immunomodulatory activity.

[0196] By “TAP-associated glycoprotein (Tapasin; TAPBP) polynucleotide” is meant a nucleic acid molecule encoding an Tapasin polypeptide, as well as the introns, exons, 3′ untranslated regions, 5′ untranslated regions, and regulatory sequences associated with its expression, or fragments thereof. In embodiments, a Tapasin polynucleotide is the genomic sequence, cDNA, mRNA, or gene associated with and/or required for Tapasin expression. An exemplary Tapasin polynucleotide sequence is provided at NCBI Ref. Seq. Accession No. NM_003190.5. The tapasin gene corresponds to Ensembl: ENSG00000231925, ENSG00000236490, ENSG00000206281, ENSG00000206208, and ENSG00000112493.

[0197] By “T Cell Receptor Alpha Constant (TRAC) polypeptide” is meant a protein having at least about 85% amino acid sequence identity to UniProtKB/Swiss-Prot Accession No. P01848.2, or a fragment thereof having immunomodulatory activity.

[0198] By “T Cell Receptor Alpha Constant (TRAC) polynucleotide” is meant a nucleic acid molecule encoding an TRAC polypeptide, as well as the introns, exons, 3′ untranslated regions, 5′ untranslated regions, and regulatory sequences associated with its expression, or fragments thereof. In embodiments, a TRAC polynucleotide is the genomic sequence, cDNA, mRNA, or gene associated with and/or required for TRAC expression. An exemplary TRAC polynucleotide is provided at Ensembl: ENSG00000277734.8.

[0199] By “Transporter associated with antigen processing I (TAP1) polypeptide” is meant a protein having at least about 85% amino acid sequence identity to NCBI Ref. Seq. Accession No. NP_000584.3, or a fragment thereof having immunomodulatory activity.

[0200] By “Transporter associated with antigen processing I (TAP1) polynucleotide” is meant a nucleic acid molecule encoding an TAP1 polypeptide, as well as the introns, exons, 3′ untranslated regions, 5′ untranslated regions, and regulatory sequences associated with its expression, or fragments thereof. In embodiments, a TAP1 polynucleotide is the genomic sequence, cDNA, mRNA, or gene associated with and/or required for TAP1 expression. An exemplary TAP1 polynucleotide sequence is provided at NCBI Ref. Seq. Accession No. NM_000593.6. The TAP1 gene corresponds to Ensembl: ENSG00000168394.

[0201] By “Transporter associated with antigen processing II (TAP2) polypeptide” is meant a protein having at least about 85% amino acid sequence identity to NCBI Ref. Seq. Accession No. NP_000535.3, or a fragment thereof having immunomodulatory activity.

[0202] By “Transporter associated with antigen processing II (TAP2) polynucleotide” is meant a nucleic acid molecule encoding an TAP2 polypeptide, as well as the introns, exons, 3′ untranslated regions, 5′ untranslated regions, and regulatory sequences associated with its expression, or fragments thereof. In embodiments, a TAP2 polynucleotide is the genomic sequence, cDNA, mRNA, or gene associated with and/or required for TAP2 expression. An exemplary TAP2 polynucleotide sequence is provided at NCBI Ref. Seq. Accession No. NM_000544.3. The TAP2 gene corresponds to Ensembl: ENSG00000204267.

[0203] The term “target site” refers to a nucleotide sequence or nucleobase of interest within a nucleic acid molecule that is modified. In embodiments, the modification is deamination of a base. The deaminase can be a cytidine or an adenine deaminase. The fusion protein or base editing complex comprising a deaminase may comprise a dCas9-adenosine deaminase fusion protein, a Cas12b-adenosine deaminase fusion, or a base editor disclosed herein.

[0204] By “T cell receptor beta constant 1 polypeptide (TRBC1) polypeptide” is meant a protein having at least about 85% amino acid sequence identity to UniProtKB/Swiss-Prot. Accession No. P01850, or a fragment thereof having immunomodulatory activity.

[0205] By “T cell receptor beta constant 1 polypeptide (TRBC1) polynucleotide” is meant a nucleic acid molecule encoding a TRBC1 polypeptide, as well as the introns, exons, 3′ untranslated regions, 5′ untranslated regions, and regulatory sequences associated with its expression, or fragments thereof. In embodiments, a TRBC1 polynucleotide is the genomic sequence, cDNA, mRNA, or gene associated with and/or required for TRBC1 expression. An exemplary TRBC1 polynucleotide sequence is provided at GenBank Accession No. X00437.1. The TRBC1 gene corresponds to Ensembl: ENSG00000211751.

[0206] By “T cell receptor beta constant 2 (TRBC2) polypeptide” is meant a protein having at least about 85% amino acid sequence identity to UniProtKB/Swiss-Prot Accession No. A0A5B9, or a fragment thereof having immunomodulatory activity.

[0207] By “T cell receptor beta constant 2 (TRBC2) polynucleotide” is meant a nucleic acid molecule encoding a TRBC2 polypeptide, as well as the introns, exons, 3′ untranslated regions, 5′ untranslated regions, and regulatory sequences associated with its expression, or fragments thereof. In embodiments, a TRBC2 polynucleotide is the genomic sequence, cDNA, mRNA, or gene associated with and/or required for TRBC2 expression. An exemplary TRBC2 polynucleotide sequence is provided at NCBI Ref. Seq. Accession No. NG_001333.2:655095-656583. The TRBC2 gene corresponds to Ensembl: ENSG00000211772.

[0208] As used herein, the terms “treat,” “treating,” “treatment,” and the like refer to reducing or ameliorating a disorder and/or symptoms associated therewith or obtaining a desired pharmacologic and/or physiologic effect. It will be appreciated that, although not precluded, treating a disorder or condition does not require that the disorder, condition, or symptoms associated therewith be completely eliminated. In some embodiments, the effect is therapeutic, i.e., without limitation, the effect partially or completely reduces, diminishes, abrogates, abates, alleviates, decreases the intensity of, or cures a disease and/or adverse symptom attributable to the disease. In some embodiments, the effect is preventative, i.e., the effect protects or prevents an occurrence or reoccurrence of a disease or condition. To this end, the presently disclosed methods comprise administering a therapeutically effective amount of a composition as described herein.

[0209] By “regulatory T (T_{REG}) cell” is meant an immune cell that acts to suppress an immune response. In embodiments, T_{REG} cells inhibit T cell proliferation and/or cytokine production. In embodiments, T_{REG} cells have the immunophenotype CD4⁺, CD25⁺, and CD127⁻. In embodiments, the T_{REG} cells have one or more of the following immunophenotypes: CD3⁺, CD4⁺, CD5⁺, CD14⁻, CD19⁻, CD25/IL-2 R alpha⁺, CD39/ENTPD1⁺, 5′ Nucleotidase/CD73⁺, CD103/Integrin alpha E⁺, CD127⁺, CTLA-4⁺, Folate Receptor 4⁺, FoxP3⁺, LRRC32/GARP⁺, GITR⁺, IL-7 R alpha/CD127^{low}, Helios^{+/-}, LAG-3/CD223⁺, LAP⁺, Neuropilin-1/BDCA-4⁺, OX40/CD134⁺, L-Selectin/CD26L⁺, and STAT5+. In some instances, a T_{REG} cell secretes one or more cytokines selected from Galectin-1, TGF-beta, IL-10, and IL-35. In some cases, the T_{REG} cells have an immunophenotype detected as the presence or absence of one or more of the following markers: CD8, CD28, CD45RA, CD45RO, Qa-1, HLA-E, or any polypeptide targeted by and/or edited using the base editors and methods provided herein.

[0210] By “UL16 binding protein 1-6 (ULBP) polypeptide” is meant a protein having at least about 85% amino acid sequence identity to GenBank Accession No. AAK13081.1 (ULBP1), AAK13082.1 (ULBP2), AAK13083.1 (ULBP3), or AVP72463.1 (ULBP4), or NCBI Ref. Seq. No. NP_001001788.2 (ULBP5) or NP_570970.2 (ULBP6), or a fragment thereof having immunomodulatory activity.

[0211] By “UL16 binding protein 1-6 (ULBP) polynucleotide” is meant a nucleic acid molecule encoding an ULBP polypeptide, as well as the introns, exons, 3′ untranslated regions, 5′ untranslated regions, and regulatory sequences associated with its expression, or fragments thereof. In embodiments, a ULBP polynucleotide is the genomic sequence, cDNA, mRNA, or gene associated with and/or required for ULBP expression. An exemplary ULBP polynucleotide sequence is provided at GenBank Accession Nos. AF304379.1 (ULBP3), AF304378.1 (ULBP2), AF304377.1 (ULBP1), MH020173.1 (ULBP4), and NCBI Ref. Seq. Nos. NM_001001788.4 (ULBP5) and NM_130900.3 (ULBP6). ULBP1 gene corresponds to Ensembl: ENSG00000111981; ULBP2 gene corresponds to Ensembl: ENSG00000131015; ULBP3 gene corresponds to Ensembl: ENSG00000131019; ULBP4 gene corresponds to Ensembl: ENSG00000164520; ULBP5 gene corresponds to Ensembl: ENSG00000203722; and ULBP6 corresponds to Ensembl: ENSG00000155918.

[0212] By “uracil glycosylase inhibitor” or “UGI” is meant an agent that inhibits the uracil-excision repair system. Base editors comprising a cytidine deaminase convert cytosine to uracil, which is then converted to thymine through DNA replication or repair. In various embodiments, a uracil DNA glycosylase (UGI) prevent base excision repair which changes the U back to a C. In some instances, contacting a cell and/or polynucleotide with a UGI and a base editor prevents base excision repair which changes the U back to a C. An exemplary UGI comprises an amino acid sequence as follows:

>sp|P14739|UNGI_BPPB2 Uracil-DNA glycosylase
inhibitor
(SEQ ID NO: 231)
MTNLSDIIEKETGKQLVIQESILMLPEEVEEVIGNKPESDILVHTAYDE
STDENVMLLTSDAPEYKPWALVIQDSNGENKIKML.

[0213] In some embodiments, the agent inhibiting the uracil-excision repair system is a uracil stabilizing protein (USP). See, e.g., WO 2022015969 A1, incorporated herein by reference.

[0214] As used herein, the term “vector” refers to a means of introducing a nucleic acid sequence into a cell, resulting in a transformed cell. Vectors include plasmids, transposons, phages, viruses, liposomes, lipid nanoparticles, and episomes.

[0215] Ranges provided herein are understood to be shorthand for all of the values within the range. For example, a range of 1 to 50 is understood to include any number, combination of numbers, or sub-range from the group consisting 1, 2, 3, 4, 5, 6, 7, 8, 9, 10, 11, 12, 13, 14, 15, 16, 17, 18, 19, 20, 21, 22, 23, 24, 25, 26, 27, 28, 29, 30, 31, 32, 33, 34, 35, 36, 37, 38, 39, 40, 41, 42, 43, 44, 45, 46, 47, 48, 49, or 50.

[0216] The recitation of a listing of chemical groups in any definition of a variable herein includes definitions of that variable as any single group or combination of listed groups. The recitation of an embodiment for a variable or aspect herein includes that embodiment as any single embodiment or in combination with any other embodiments or portions thereof.

[0217] All terms are intended to be understood as they would be understood by a person skilled in the art. Unless defined otherwise, all technical and scientific terms used herein have the same meaning as commonly understood by one of ordinary skill in the art to which the disclosure pertains

[0218] In this application, the use of the singular includes the plural unless specifically stated otherwise. It must be noted that, as used in the specification, the singular forms “a,” “an” and “the” include plural referents unless the context clearly dictates otherwise. In this application, the use of “or” means “and/or” unless stated otherwise. Furthermore, use of the term “including” as well as other forms, such as “include”, “includes,” and “included,” is not limiting.

[0219] As used in this specification and claim(s), the words “comprising” (and any form of comprising, such as “comprise” and “comprises”), “having” (and any form of having, such as “have” and “has”), “including” (and any form of including, such as “includes” and “include”) or “containing” (and any form of containing, such as “contains” and “contain”) are inclusive or open-ended. This wording indicates that specified elements, features, components, and/or method steps are present, but does not exclude the presence of other elements, features, components, and/or method steps. Any embodiments specified as “comprising” a particular component(s) or element(s) are also contemplated as “consisting of” or “consisting essentially of” the particular component(s) or element(s) in some embodiments. It is contemplated that any embodiment discussed in this specification can be implemented with respect to any method or composition of the present disclosure, and vice versa. Furthermore, compositions of the present disclosure can be used to achieve methods of the present disclosure.

[0220] The term “about” or “approximately” means within an acceptable error range for the particular value as determined by one of ordinary skill in the art, which will depend in part on how the value is measured or determined, i.e., the limitations of the measurement system.

[0221] Reference in the specification to “some embodiments,” “an embodiment,” “one embodiment” or “other embodiments” means that a particular feature, structure, or characteristic described in connection with the embodiments is included in at least some embodiments, but not necessarily all embodiments, of the present disclosures.

### BRIEF DESCRIPTION OF THE DRAWINGS

[0222] FIG. 1 provides a schematic diagram providing an overview of the preparation of peripheral blood mononuclear cells (PBMCs) and regulatory T cells (T_{REG}'S) for expansion and/or editing. The preparation involved seven steps: 1) Receive fresh leukopak (HemaCare); 2) Process leukopak by ficoll density gradient centrifugation to isolate PBMCs; 3) Cryopreserve PBMCs for convenient use; 4) Thaw cryopreserved PBMCs; 5) Isolate CD4+ T cells by magnetic selection (i.e., CD4 Microbeads, Miltenyi); 6) Stain CD4+ T cells with fluorochrome conjugated antibodies and FACS sort; and 7) Sort T_{REG} cells: Viable/CD4⁺/CD25⁺/CD127⁻. T_{REG} cells were sorted out based upon high CD4 expression, high CD25 expression, and low CD127 expression. The gating strategy used to select for viable T_{REG} cells is presented in the lower portion of FIG. 1 as a series of representative flow cytometry scatter plots.

[0223] FIG. 2 provides a schematic diagram showing an overview of a multiplex base editing strategy to knock-out surface receptors implicated in T_{REG} function. The HLA specific CAR of the modified Treg cells binds to donor Tconv cells, reducing or preventing GVHD. FIG. 2 shows how disruption of surface receptors can be used to improve chimeric antigen receptor (CAR) T_{REG} function. PD-1 is an inhibitory receptor that dampens T_{REG} activation. CD70 is a costimulatory ligand for CD27, which is widely expressed on conventional T cells (T_{CONV}). CD58 is a costimulatory ligand for CD2, which is widely expressed on (T_{CONV}). Knockout of CD70 and CD58 can reduce potential activation of T_{CONV} by the edited T_{REG}.

[0224] FIGS. 3A and 3B provide schematic diagrams showing an overview of how T_{REG} cell function can be improved by editing polynucleotides encoding T_{CONV} costimulatory ligands to reduce the expression thereof in the T_{REG} cells. FIG. 3A provides a schematic diagram showing how the CD27/CD70 signaling axis promotes T_{CONV} activation and proliferation. FIG. 3B provides a schematic diagram showing how CD70 expression by T_{REG} can counter suppressive activity of the T_{REG} by binding a CD27 costimulatory receptor on T_{CONV}. In embodiments, the T_{REG} cells are chimeric antigen receptor (CAR) T_{REG} cells and surface-express a CAR that targets an HLA.

[0225] FIGS. 4A-4D provide flow cytometry scatter plots showing that CD70+ T_{REG} cells exhibited a unique phenotype as compared to CD70− counterparts. FIG. 4A provides a flow cytometry scatter plot showing D14 of expansion for a population containing edited (CD70−) and unedited (CD70+) cells, which are the same edited and unedited cells that were evaluated in FIGS. 4B-4D. FIG. 4B provides flow cytometry scatter plots showing that CD70− cells co-expressed FoxP3 and helios, which are both markers of T_{REG} function. CD70− cells had higher expression levels of the transcription factors FoxP3 and helios, which was consistent with the knockout of CD70 improving T_{REG} cell function. FIG. 4C provides flow cytometry scatter plots showing that CD70− cells expressed higher levels of CTLA4 than CD70+ cells.

[0226] FIG. 4D provides flow cytometry scatter plots showing that CD70− cells (left of plot) expressed higher levels of GARP and FoxP3 than CD70+ cells (right of plot) when stimulated with T Cell TransAct™, which is a reagent used to activate and expand human T cells via CD3 and CD28.

[0227] FIGS. 5A and 5B provide bar graphs showing maximum editing of CD70 using the indicated guides (see Tables 1A-2C). FIG. 5A is a bar graph showing total on-target editing A4G and C4T editing using the indicated guides. FIG. 5B shows total bystander A4G and C4T editing using the indicated guides.

[0228] FIG. 6 provides flow cytometry scatter plots showing successful CD70 knock-out in T_{REG} cells using base editing. A large reduction in CD70 expression was observed in base-edited cells.

[0229] FIGS. 7A and 7B provide flow cytometry scatter plots and FIG. 7C provides a bar graph showing that CD70 knockout (KO) T_{REG} cells were phenotypically indistinguishable from unedited control cells. The edited cells showed little-to-no reduction in FoxP3. Limited evidence of CD7-CD70 reverse signaling was observed. In FIG. 7C, “Untx” represents “untransduced cells.”

[0230] FIGS. 8A and 8B provide a schematic diagram and a collection of histograms showing that disrupting CD70 in T_{REG} cells inhibited T_{CONV} costimulation. FIG. 8A provides a schematic diagram showing how CD70 of T_{REG} cells binds to CD27 in T_{CONV} cells leading to the activation of the T_{CONV} cells by inducing conventional T-cell costimulation. Knockout of CD70 in T_{REG} cells prevents activation of T_{CONV} cells by CD70 and leads to a reduction in T_{CONV} proliferation in the presence of the T_{REG} cells, as shown. FIG. 8B provides histograms showing dilution (i.e., lowering of fluorescence intensity as indicated on the x-axis) of CellTrace™ Violet dye signal peak (i.e., cell proliferation) in T_{CONV} cultured in the presence of unedited and CD70 knockout (KO) T_{REG}. Each cell division led to a reduction by about half of the CellTrace™ Violet dye signal. Lower levels of T_{CONV} proliferation were observed in the presence of edited T_{REG} cells than in the presence of unedited T_{REG} cells.

[0231] FIG. 9 provides a bar graph showing max on-target A4G base editing of CD58 using the indicated guide RNA (see Tables 1A-2C).

[0232] FIGS. 10A-10D provide flow cytometry scatter plots and a schematic diagram showing that inhibitory receptor (i.e., PD-1) editing enhanced T_{REG} cell function. PD-1 attenuates T_{CONV} activation by dephosphorylating kinases in the T cell receptor (TCR) signal cascade. The PD-1/PD-L1 axis restrains T_{REG} activation. FIG. 10A provides a flow cytometry scatter plot confirming low surface expression of PD-1 in edited T_{REG} cells. FIG. 10B provides a schematic diagram showing that knockout of PD-1 in the T_{REG} cells prevents inhibition of the T_{REG} cells by PD-L1. FIG. 10C provides a flow cytometry scatter plot showing PD-1 expression in unedited T_{REG} and T_{CONV} cells. FIG. 10D provides a flow cytometry scatter plot showing PD-L1 expression in T cells from spleen and bone marrow samples.

[0233] FIG. 11 provides a bar graph showing max on-target A4G editing of PD-1 in T_{REG} cells using the indicated guide RNA (see Tables 1A-2C).

[0234] FIG. 12 provides a bar graph showing max on-target A4G editing of SIRT1 in T_{REG} cells using the indicated guide RNA (see Tables 1A-2C). Knockout of SIRT1 expression promotes expression of FoxP3, an important transcription factor in T_{REG} cells. Histones are involved in silencing FoxP3 expression, so, in some embodiments, knockout of SIRT1 can reduce or eliminate such silencing.

[0235] FIG. 13 provides a bar graph showing maximum A→G and C→T editing of SIRT1 in T_{CONV} cells using the indicated guide RNAs (see Tables 1A-2C).

[0236] FIG. 14 provides a bar graph showing maximum on-target A→G and C→T editing of B2M in T_{REG} cells using the indicated guide RNAs (see Tables 1A-2C).

[0237] FIG. 15 provides a bar graph showing maximum A→G and C→T editing of RNF20 in T cells using the indicated guide RNAs (see Tables 1A-2C).

[0238] FIG. 16 provides a bar graph showing maximum on-target A→G editing of RNF20 in T_{REG} using the indicated guide RNAs (see Tables 1A-2C).

[0239] FIGS. 17A and 17B provide flow cytometry scatter plots and a bar graph showing that RNF20 edited T_{REG} cells had increased expression of FoxP3. FIGS. 17A and 17B provide scatter plots and a bar graph showing that RNF20 edited T_{REG} cells showed a shift in FoxP3 mean fluorescence intensity after editing using guide RNAs (see Tables 1A-2C). In FIG. 17A, the x-axis indicates level of FoxP3, and the y-axis indicates the level of Helios. In FIG. 17B, the x-axis identifies the guide and editor, and the y-axis indicates the geometric mean MFI.

[0240] FIG. 18 provides a schematic diagram showing how chimeric antigen receptor (CAR) T regulatory cell (T_{REG} or T_{REG} cell) lineage stability and suppressive function can be improved through multiplex base editing to knock-out surface receptors implicated in T_{REG} function. In embodiments, multiplex editing involves editing of one or more of SIRT1, RNF20, PD-1, CD70, CD58, and B2M. The editing results in the reduction or elimination of expression and/or activity of the target gene.

[0241] FIG. 19 provides a bar graph showing 5-plex multiplex editing of T_{REG} cells using the indicated guide RNAs (see Tables 1A-2C) to knockout SIRT1, PD-1, CD70, CD58, and B2M.

[0242] FIG. 20 provides a collection of flow cytometry scatter plots showing successful multiplex base-editing of T_{REG} cells to reduce and/or eliminate surface-expression of CD58, CD70, PD-1, and B2M. The left panel of FIG. 20 illustrates a gating strategy used to sort for T_{REG} cells surface-expression anti-NGFR chimeric antigen receptors (i.e., NGFR+). The right panel of FIG. 20 shows measured surface-expression of the indicated target genes (i.e., CD58, CD70, PD-1, and B2M) in edited and unedited anti-NGFR-CAR T_{REG} cells.

### DETAILED DESCRIPTION

[0243] The disclosure features modified regulatory T (T_{REG}) cells (e.g., chimeric antigen receptor (CAR) T_{REG} cells) having increased lineage stability, decreased activation of T cells (e.g., conventional T (T_{CONV}) cells), and/or increased resistance to immune rejection (i.e., functionally enhanced and/or lineage stabilized regulatory T (T_{REG}) cells), and methods of producing and using such cells, for example, in the treatment of graft versus host disease (GVHD).

[0244] The embodiments of the disclosure are based, at least in part, on the discovery that the functionality and lineage stability of CAR T_{REG} cells can be increased by modifying one or more genes encoding BRINP1, CD58, CD70, CHIP, JNK1, PRKCQ, PD-1, RNF20, and/or SIRT1 to reduce activity and/or expression of the encoded polypeptides in the cells. PD-1 is an inhibitory receptor that dampens T cell activation, so reducing expression and/or activity of PD-1 in a T_{REG} cell can improve function of the cell by eliminating such dampening. CD70 and CD58 are costimulatory ligands for CD27 and CD2, respectively, that are expressed on the surface of conventional T (T_{CONV}) cells. Therefore, eliminating activity and/or expression of CD70 and/or CD58 in the T_{REG} cells prevents stimulation/activation of T_{CONV} cells (e.g., proliferation). In some embodiments, reducing expression and/or activity of BRINP1, CHIP, JNK1, PRKCQ, RNF20, and/or SIRT1 is associated with an increase in T_{REG} lineage stability and an increase in expression of FoxP3.

[0245] Accordingly, the disclosure provides modified CAR T_{REG} cells comprising one or more gene modifications that result in improved lineage stability and/or suppressive functionality. The disclosure also provides methods for treatment of alloimmune (e.g., graft versus host disease) or autoimmune diseases using the T_{REG} cells. The T_{REG} cells are suitable in embodiments for the treatment of any disease associated with an undesired immune activity or response (e.g., to increase organ transplant tolerance). In various instances, the methods of the disclosure stabilize or increase FoxP3 expression in a T_{REG} cell and reduce pathogenic T_{REG}-to-Th17 transition in response to stimulation.

[0246] In some embodiments, the CAR-T_{REG} cells have increased lineage stability and/or enhanced functionality (e.g., less activation of T_{CONV} cells and/or lower allorecognition) as compared to a similar CAR-T_{REG} cell without further modifications to one or more genes as described herein. In some embodiments, the CAR-T_{REG} cells have reduced immunogenicity as compared to a similar CAR-T_{REG} cell without further modifications to one more genes as described herein. In some embodiments, the CAR-T_{REG} cells have increased T_{CONV} cell inhibition activity as compared to a similar CAR-T_{REG} cell without further modifications to one or more genes as described herein.

[0247] The one or more genes may be edited by base editing or through use of a nuclease (e.g., a Cas12b). In some embodiments the one or more genes, or one or more regulatory elements thereof, or combinations thereof, may be selected from a group consisting of: BRINP1, JNK1, PRKCQ, CHIP, CD70, CD58, PD-1, SIRT1, and RNF20. In some embodiments, the one or more genes, or regulatory elements thereof, comprise a combination of targets including one or more of BRINP1, CHIP, JNK1, PRKCQ, SIRT1, and RNF20, and one or more of PD-1, CD70, and CD58. In embodiments, the combination of targets further includes β2M (B2M). In some embodiments, the one or more genes comprise a combination of targets selected from the following: SIRT1, PD-1, CD70, and CD58; SIRT1, PD-1, and CD70; SIRT1, PD-1, and CD58; SIRT1, CD70, and CD58; SIRT1 and PD-1; SIRT1 and CD70; SIRT1 and CD58; SIRT1, PD-1, CD70, CD58, and B2M; SIRT1, PD-1, CD70, and B2M; SIRT1, PD-1, CD58 and B2M; SIRT1, CD70, CD58, and B2M; SIRT1, PD-1, and B2M; SIRT1, CD70, and B2M; SIRT1, CD58, and B2M; RNF20, PD-1, CD70, and CD58; RNF20, PD-1, and CD70; RNF20, PD-1, and CD58; RNF20, CD70, and CD58; RNF20 and PD-1; RNF20 and CD70; RNF20 and CD58; RNF20, PD-1, CD70, CD58, and B2M; RNF20, PD-1, CD70, and B2M; RNF20, PD-1, CD58 and B2M; RNF20, CD70, CD58, and B2M; RNF20, PD-1, and B2M; RNF20, CD70, and B2M; RNF20, CD58, and B2M; SIRT1, RNF20, PD-1, CD70, and CD58; SIRT1, RNF20, PD-1, and CD70; SIRT1, RNF20, PD-1, and CD58; SIRT1, RNF20, CD70, and CD58; SIRT1, RNF20, and PD-1; SIRT1, RNF20, and CD70; SIRT1, RNF20, and CD58; SIRT1, RNF20, PD-1, CD70, CD58, and B2M; SIRT1, RNF20, PD-1, CD70, and B2M; SIRT1, RNF20, PD-1, CD58, and B2M; SIRT1, RNF20, CD70, CD58, and B2M; SIRT1, RNF20, PD-1, and B2M; SIRT1, RNF20, CD70, and B2M; and SIRT1, RNF20, CD58, and B2M. In some instances, the combination of targets includes one or more of TAP1, TAP2, Tapasin, NLRC5, CD155, HLA-A, HLA-B, HLA-C, MICA, MICB, Nectin-2, TRAC, ULBP, CIITA, TRBC1, TRBC2, and CD52.

[0248] In various instances, the methods of the present disclosure involve overexpressing in the cell an inhibitory receptor, or fragment thereof, selected from one or more of Human Leukocyte Antigen-E (HLA-E), Human Leukocyte Antigen-G (HLA-G), Programmed Death Ligand 1 (PD-L1), and Cluster of Differentiation 47 (CD47). In some instances, the methods of the present disclosure involve modifying an immune cell (e.g., a T_{REG} cell) to increase or cause expression of one or more polypeptides selected from HLA-E, HLA-G, PD-L1, and/or CD47 (e.g., by editing a promoter or regulatory sequence thereof, or by introducing into the cell a polynucleotide encoding the polypeptide(s)). Expression of one or more of these polypeptides can increase the persistence of a modified immune cell in a subject.

### Editing of Target Genes

[0249] To produce the gene edits described herein, T_{REG} cells are collected from a subject and contacted with one, two, or more guide RNAs and a nucleobase editor polypeptide comprising a nucleic acid programmable DNA binding protein (napDNAbp) and a cytidine deaminase or adenosine deaminase, or comprising one or more deaminases with cytidine deaminase and/or adenosine deaminase activity. In some embodiments, cells to be edited are contacted with at least one nucleic acid, wherein the at least one nucleic acid encodes two or more guide RNAs and a nucleobase editor polypeptide comprising a nucleic acid programmable DNA binding protein (napDNAbp) and a cytidine deaminase. In some embodiments, the guide RNA comprises nucleotide analogs. In various instances, the gRNA is added directly to a cell. These nucleotide analogs can inhibit degradation of the gRNA from cellular processes. Tables 2A-2C provide target sequences to be used for gRNAs. Exemplary guide RNAs are provided in Tables 1A-1C. Further non-limiting examples of target sequences, spacer, sequences, and guide RNAs suitable for use in the compositions and methods of the present disclosure include those described in PCT/US20/13964, PCT/US20/52822, PCT/US20/18178, and/or PCT/US21/52035.

[0250] In embodiments, the guide RNAs comprise a scaffold sequence. Non-limiting examples of scaffold sequences include the following:

GUUUUAGAGCUAGAAAUAGCAAGUUAAAAUAAGGCUAGUCCGUUAUCAA
CUUGAAAAAGUGGCACCGAGUCGGUGCUUUU (Base Editor
(BE) Scaffold Sequence; SEQ ID NO: 994);
and
GUUCUGUCUUUUGGUCAGGACAACCGUCUAGCUAUAAGUGCUGCAGGGU
GUGAGAAACUCCUAUUGCUGGACGAUGUCUCUUACGAGGCAUUAGCAC
(Cas12b Scaffold Sequence; SEQ ID NO: 995).

[0251] In various instances, it is advantageous for a spacer sequence to include a 5′ and/or a 3′ “G” nucleotide. In some cases, for example, any spacer sequence or guide polynucleotide provided herein comprises or further comprises a 5′ “G”, where, in some embodiments, the 5′ “G” is or is not complementary to a target sequence. In some embodiments, the 5′ “G” is added to a spacer sequence that does not already contain a 5′ “G.” For example, it can be advantageous for a guide RNA to include a 5′ terminal “G” when the guide RNA is expressed under the control of a U6 promoter or the like because the U6 promoter prefers a “G” at the transcription start site (see Cong, L. et al. “Multiplex genome engineering using CRISPR/Cas systems. Science 339:819-823 (2013) doi: 10.1126/science.1231143). In some cases, a 5′ terminal “G” is added to a guide polynucleotide that is to be expressed under the control of a promoter but is optionally not added to the guide polynucleotide if or when the guide polynucleotide is not expressed under the control of a promoter.

TABLE 1A
Exemplary guide RNAs

| | SEQ ID NOs | |
|---|---|---|
| | (respectively corresponding | Editor |
| gRNA Names | to the listed guides) | Options |
| TSBTx2811; TSBTx2812; TSBTx2829; TSBTx1062; TSBTx2813; | 429; 430; 447; 581; 431; | ABE/ |
| TSBTx2818; TSBTx3635; TSBTx1089; TSBTx1090; TSBTx1092; | 436; 494; 545; 546; 548; | CBE |
| TSBTx1103; TSBTx1108; Guide 415; Guide 419; Guide 420; | 559; 518; 645; 649; 650; | |
| Guide 422; Guide 423; Guide 424; Guide 425; Guide 426; Guide | 652; 653; 654; 655; 656; | |
| 428; Guide 429; Guide 430; Guide 431; Guide 432; Guide 433; | 658; 659; 660; 661; 662; | |
| Guide 434; Guide 435; Guide 436; Guide 437; Guide 438; Guide | 663; 664; 665; 666; 667; | |
| 439; Guide 440; Guide 441; Guide 442; TSBTx1660; TSBTx1661; | 668; 669; 670; 671; 672; | |
| TSBTx1665; TSBTx1669; TSBTx1670; TSBTx1673; TSBTx1681; | 389; 390; 394; 398; 399; | |
| TSBTx1685; TSBTx1689; TSBTx1697; TSBTx025; TSBTx845; | 402; 410; 414; 418; 426; | |
| TSBTx1118; TSBTx1124; TSBTx1130; TSBTx1152; TSBTx1146; | 499; 500; 508; 511; 513; | |
| TSBTx1142; TSBTx1097; TSBTx1074; TSBTx1069; TSBTx1063; | 525; 531; 534; 553; 569; | |
| TSBTx1057; TSBTx1054; TSBTx1053 | 574; 580; 586; 589; 590 | |
| CD58.1; CD58.2 (TSBTx2834); CD58.3 | 673; 674; 675 | ABE/ |
| | | CBE/ |
| | | Cas9 |
| TSBTx1666; TSBTx1667; TSBTx1686; TSBTx1687; TSBTx1690; | 395; 396; 415; 416; 419; | ABE |
| TSBTx1694; TSBTx2810; TSBTx2815; TSBTx2817; TSBTx2821; | 423; 428; 433; 435; 439; | |
| TSBTx2823; TSBTx3633; TSBTx3634; TSBTx1111; TSBTx1112; | 441; 492; 493; 519; 520; | |
| TSBTx1120; TSBTx1131; TSBTx1151; TSBTx1140; TSBTx1088; | 521; 522; 526; 536; 544; | |
| TSBTx1091; TSBTx1093; TSBTx1096; TSBTx1101; TSBTx1104; | 547; 549; 551; 557; 560; | |
| TSBTx1073; TSBTx1072; TSBTx1132; Guide 421 | 570; 571; 598; 651 | |
| TSBTx3325; TSBTx3326; TSBTx3327; TSBTx3328; TSBTx3329; | 451; 452; 453; 454; 455; | Cas12b |
| TSBTx3330; TSBTx3331; TSBTx3332; TSBTx3333; TSBTx3334; | 456; 457; 458; 459; 460; | |
| TSBTx3335; TSBTx3336; TSBTx3337; TSBTx3353; TSBTx3354; | 461; 462; 463; 464; 465; | |
| TSBTx3355; TSBTx3356; TSBTx3357; TSBTx3358; TSBTx3359; | 466; 467; 468; 469; 470; | |
| TSBTx3360; TSBTx3361; TSBTx3362; TSBTx3363; TSBTx3364; | 471; 472; 473; 474; 475; | |
| TSBTx3365; TSBTx3366; TSBTx3367; TSBTx3368; TSBTx3369; | 476; 477; 478; 479; 480; | |
| TSBTx3370; TSBTx3371; TSBTx3372; TSBTx3373; TSBTx3374; | 481; 482; 483; 484; 485; | |
| TSBTx3375; TSBTx3376; TSBTx3377; TSBTx3378; TSBTx3379; | 486; 487; 488; 489; 490; | |
| TSBTx3380; TSBTx3338; TSBTx3339; TSBTx3340; TSBTx3341; | 491; 602; 603; 604; 605; | |
| TSBTx3342; TSBTx3343; TSBTx3344; TSBTx3345; TSBTx3346; | 606; 607; 608; 609; 610; | |
| TSBTx3347; TSBTx3348; TSBTx3349; TSBTx3350; TSBTx3351; | 611; 612; 613; 614; 615; | |
| TSBTx3352; TSBTx3353; TSBTx3354; TSBTx3355; TSBTx3356; | 616; 617; 618; 619; 620; | |
| TSBTx3357; TSBTx3358; TSBTx3359; TSBTx3360; TSBTx3361; | 621; 622; 623; 624; 625; | |
| TSBTx3362; TSBTx3363; TSBTx3364; TSBTx3365; TSBTx3366; | 626; 627; 628; 629; 630; | |
| TSBTx3367; TSBTx3368; TSBTx3369; TSBTx3370; TSBTx3371; | 631; 632; 633; 634; 635; | |
| TSBTx3372; TSBTx3373; TSBTx3374; TSBTx3375; TSBTx3376; | 636; 637; 638; 639; 640; | |
| TSBTx3377; TSBTx3378; TSBTx3379; TSBTx3380 | 641; 642; 643; 644 | |
| TSBTx1662; TSBTx1663; TSBTx1664; TSBTx1668; TSBTx1671; | 391; 392; 393; 397; 400; | CBE |
| TSBTx1672; TSBTx1674; TSBTx1675; TSBTx1676; TSBTx1677; | 401; 403; 404; 405; 406; | |
| TSBTx1678; TSBTx1679; TSBTx1680; TSBTx1682; TSBTx1683; | 407; 408; 409; 411; 412; | |
| TSBTx1684; TSBTx1688; TSBTx1691; TSBTx1692; TSBTx1693; | 413; 417; 420; 421; 422; | |
| TSBTx1695; TSBTx1696; TSBTx1698; TSBTx2814; TSBTx2816; | 424; 425; 427; 432; 434; | |
| TSBTx2819; TSBTx2820; TSBTx2822; TSBTx2824; TSBTx2825; | 437; 438; 440; 442; 443; | |
| TSBTx2826; TSBTx2827; TSBTx2828; TSBTx2830; TSBTx2831; | 444; 445; 446; 448; 449; | |
| TSBTx2853; TSBTx3636; TSBTx3637; TSBTx3638; TSBTx3639; | 450; 495; 496; 497; 498; | |
| TSBTx1105; TSBTx1109; TSBTx1110; TSBTx1113; TSBTx1114; | 501; 502; 503; 504; 505; | |
| TSBTx1116; TSBTx1117; TSBTx1122; TSBTx1121; TSBTx1129; | 506; 507; 509; 510; 512; | |
| TSBTx1133; TSBTx1136; TSBTx1137; TSBTx1107; TSBTx1106; | 514; 515; 516; 517; 523; | |
| TSBTx1153; TSBTx1149; TSBTx1150; TSBTx1148; TSBTx1147; | 524; 527; 528; 529; 530; | |
| TSBTx1145; TSBTx1144; TSBTx1143; TSBTx1139; TSBTx1083; | 532; 533; 535; 538; 539; | |
| TSBTx1084; TSBTx1086; TSBTx1085; TSBTx1087; TSBTx1094; | 540; 541; 542; 543; 550; | |
| TSBTx1095; TSBTx1098; TSBTx1100; TSBTx1099; TSBTx1102; | 552; 554; 555; 556; 558; | |
| TSBTx1082; TSBTx1081; TSBTx1079; TSBTx1080; TSBTx1078; | 561; 562; 563; 564; 565; | |
| TSBTx1075; TSBTx1076; TSBTx1077; TSBTx1071; TSBTx1070; | 566; 567; 568; 572; 573; | |
| TSBTx1068; TSBTx1067; TSBTx1066; TSBTx1065; TSBTx1064; | 575; 576; 577; 578; 579; | |
| TSBTx1060; TSBTx1059; TSBTx1058; TSBTx1056; TSBTx1055; | 583; 584; 585; 587; 588; | |
| TSBTx1115; TSBTx1119; TSBTx1123; TSBTx1126; TSBTx1125; | 591; 592; 593; 594; 595; | |
| TSBTx1127; TSBTx1128; TSBTx1134; TSBTx1135; TSBTx1138; | 596; 597; 599; 600; 601; | |
| Guide 416; Guide 417; Guide 418; Guide 427; TSBTx1141; | 646; 647; 648; 657; 537; | |
| TSBTx1061 | 582 | |

TABLE 1B
Exemplary guide RNAs

| Target | Exemplary guide | |
|---|---|---|
| Gene | RNA SEQ ID NOs | Editor |
| TRAC | 996-999 | BhCas12b nuclease |
| TRAC | 1000-1017 | BhCas12b |
| TRAC | 1018-1028 | BvCas12B |
| TRAC | 1029-1034 | CBE, spCas9 |

TABLE 1C
Exemplary guide RNAs suitable for use with one or more
of the following editors: CBE, ABE, Cas9, and Cas12b

| | | | Guide with Guide |
|---|---|---|---|
| | | Spacer SEQ ID NOS | Scaffold SEQ ID NOS |
| | | (respectively | (respectively |
| | | corresponding to | corresponding to |
| Guides No. | Gene | the listed guides) | the listed guides) |
| b2m_825 (TSBTx845); b2m_630; b2m_227; | B2M | 1324; 1330; 1335, | 1631; 1637; 1642; 1644; |
| b2m_596; Guide 416; Guide 417; Guide 418; | | 1337; 1103-1108; | 1410-1415; 1418-1436; |
| Guide 419; Guide 420; Guide 421; Guide | | 1111-1129; 1110; | 1417; 1416; 1409 |
| 424; Guide 425; Guide 426; Guide 427; | | 1109; 1102 | |
| Guide 428; Guide 429; Guide 430; Guide | | | |
| 431; Guide 432; Guide 433; Guide 434; | | | |
| Guide 435; Guide 436; Guide 437; Guide | | | |
| 438; Guide 439; Guide 440; Guide 441; | | | |
| Guide 442; Guide 423; Guide 422; Guide | | | |
| 415 | | | |
| TSBTx3679; TSBTx3680; TSBTx3680; | CD155 | 1183-1196 | 1490-1503 |
| TSBTx3681; TSBTx3682; TSBTx3682; | | | |
| TSBTx3683; TSBTx3684; TSBTx3684; | | | |
| TSBTx3685; TSBTx3686; TSBTx3687; | | | |
| TSBTx3688; TSBTx3689 | | | |
| TSBTx3633; TSBTx3634; TSBTx3635; | CD48 | 1130-1137 | 1437-1444 |
| TSBTx3635; TSBTx3636; TSBTx3637; | | | |
| TSBTx3638; TSBTx3639 | | | |
| CD58.1; CD58.2 (TSBTx2834); CD58.3 | CD58 | 1312-1314 | 1619-1621 |
| TSBTx4186 (846); TSBTx4187 (847); | HLA-A | 1265-1270; 1274-1278; | 1572-1577; 1581-1585; |
| TSBTx4188 (848); TSBTx4189 (849); | | 1296 | 1603 |
| TSBTx4190 (850); TSBTx4191 (851); | | | |
| TSBTx4195 (855); TSBTx4196 (856); | | | |
| TSBTx4197 (857); TSBTx4198 (858); | | | |
| TSBTx4199 (859); TSBTx4168 (877) | | | |
| TSBTx4192 (852); TSBTx4193 (853); | HLA-A, | 1271-1273; 1293 | 1578-1480; 1600 |
| TSBTx4194 (854); TSBTx4168 (874) | HLA-B, | | |
| | HLA-C | | |
| TSBTx4201 (861); TSBTx4202 (862); | HLA-B | 1280-1282; 1295 | 1587-1589; 1602 |
| TSBTx4203 (863); TSBTx4170 (876) | | | |
| TSBTx4200 (860); TSBTx4204 (864); | HLA-B, | 1279; 1283-1285 | 1586; 1590-1592 |
| TSBTx4205 (865); TSBTx4206 (866) | HLA-C | | |
| TSBTx4207 (867); TSBTx4208 (868); | HLA-C | 1286-1292; 1294 | 1593-1599; 1601 |
| TSBTx4209 (869); TSBTx4210 (870); | | | |
| TSBTx4211 (871); TSBTx4212 (872); | | | |
| TSBTx4167 (873); TSBTx4169 (875) | | | |
| TSBTx3690; TSBTx3691; TSBTx3691; | MICA | 1197-1202; 1204-1217 | 1504-1509; 1511-1524 |
| TSBTx3692; TSBTx3692; TSBTx3693; | | | |
| TSBTx3694; TSBTx3694; TSBTx3695; | | | |
| TSBTx3696; TSBTx3696; TSBTx3697; | | | |
| TSBTx3698; TSBTx3699; TSBTx3700; | | | |
| TSBTx3701; TSBTx3702; TSBTx3703; | | | |
| TSBTx3704; TSBTx3705 | | | |
| TSBTx3693; TSBTx3706; TSBTx3707; | MICB | 1203; 1218-1229 | 1510; 1525-1536 |
| TSBTx3707; TSBTx3708; TSBTx3708; | | | |
| TSBTx3709; TSBTx3709; TSBTx3710; | | | |
| TSBTx3711; TSBTx3711; TSBTx3712; | | | |
| TSBTx3712 | | | |
| TSBTx4213; TSBTx4214; TSBTx4215; | Nectin-2 | 1297-1311 | 1604-1618 |
| TSBTx4216; TSBTx4217; TSBTx4218; | | | |
| TSBTx4219; TSBTx4220; TSBTx4221; | | | |
| TSBTx4222; TSBTx4223; TSBTx4224; | | | |
| TSBTx4225; TSBTx4226; TSBTx4227 | | | |
| TSBTx3640; TSBTx3641; TSBTx3642; | NLRC5 | 1138-1164 | 1445-1471 |
| TSBTx3643; TSBTx3644; TSBTx3645; | (CITA) | | |
| TSBTx3645; TSBTx3646; TSBTx3647; | | | |
| TSBTx3648; TSBTx3649; TSBTx3650; | | | |
| TSBTx3651; TSBTx3652; TSBTx3653; | | | |
| TSBTx3654; TSBTx3654; TSBTx3655; | | | |
| TSBTx3656; TSBTx3657; TSBTx3658; | | | |
| TSBTx3659; TSBTx3660; TSBTx3661; | | | |
| TSBTx3661; TSBTx3662; TSBTx3662 | | | |
| TSBTx3724; TSBTx3724; TSBTx3725; | PDIA3 | 1230-1244 | 1537-1551 |
| TSBTx3725; TSBTx3726; TSBTx3726; | (ERp57) | | |
| TSBTx3727; TSBTx3728; TSBTx3729; | | | |
| TSBTx3730; TSBTx3731; TSBTx3732; | | | |
| TSBTx3732; TSBTx3733; TSBTx3733 | | | |
| Guide 443; Guide 444; Guide 445; Guide | TAP1 | 1035-1057; 1245-1254; | 1342-1364; 1552-1561; |
| 446; Guide 447; Guide 448; Guide 449; | | 1315; 1318; 1322; | 1622; 1625; 1629; 1632; |
| Guide 450; Guide 451; Guide 452; Guide | | 1325; 1328; 1329; | 1635; 1636; 1639; 1640; |
| 453; Guide 454; Guide 455; Guide 456; | | 1332; 1333; 1338-1340 | 1645-1647; |
| Guide 457; Guide 458; Guide 459; Guide | | | |
| 460; Guide 461; Guide 462; Guide 463; | | | |
| Guide 464; Guide 465; TSBTx3923; | | | |
| TSBTx3924; TSBTx3925; TSBTx3926; | | | |
| TSBTx3927; TSBTx3928; TSBTx3929; | | | |
| TSBTx3930; TSBTx3931; TSBTx3932; | | | |
| tap1_93; tap1_210; tap1_498; tap1_140; | | | |
| tap1_485; tap1_142; tap1_139; tap1_38; | | | |
| tap1_444; tap1_161; tap1_454 | | | |
| Guide 518 | TAP1.1 | 1082 | 1389 |
| Guide 527 | TAP1.10 | 1091 | 1398 |
| Guide 528 | TAP1.11 | 1092 | 1399 |
| Guide 529 | TAP1.12 | 1093 | 1400 |
| Guide 519 | TAP1.2 | 1083 | 1390 |
| | AND | | |
| | TAP2 | | |
| Guide 520 | TAP1.3 | 1084 | 1391 |
| | AND | | |
| | TAP 2 | | |
| Guide 521 | TAP1.4 | 1085 | 1392 |
| Guide 522 | TAP1.5 | 1086 | 1393 |
| Guide 523 | TAP1.6 | 1087 | 1394 |
| Guide 524 | TAP1.7 | 1088 | 1395 |
| Guide 525 | TAP1.8 | 1089 | 1396 |
| Guide 526 | TAP1.9 | 1090 | 1397 |
| Guide 466; Guide 467; Guide 468; Guide | TAP2 | 1058-1081; 1255-1264; | 1365-1388; 1562-1571; |
| 469; Guide 470; Guide 471; Guide 472; | | 1317; 1320; 1323; | 1624; 1627; 1630; 1633; |
| Guide 473; Guide 474; Guide 475; Guide | | 1326; 1331; 141 | 1638; 1648 |
| 476; Guide 477; Guide 478; Guide 479; | | | |
| Guide 480; Guide 481; Guide 482; Guide | | | |
| 483; Guide 484; Guide 485; Guide 486; | | | |
| Guide 487; Guide 488; Guide 489; | | | |
| TSBTx3933; TSBTx3934; TSBTx3935; | | | |
| TSBTx3936; TSBTx3937; TSBTx3938; | | | |
| TSBTx3939; TSBTx3940; TSBTx3941; | | | |
| TSBTx3942; tap2_5; tap2_4; tap2_181; | | | |
| tap1_202; tap2_325; tap2_137 | | | |
| Guide 530 | TAP2.1 | 1094 | 1401 |
| Guide 537 | TAP2.10 | 1101 | 1408 |
| Guide 531 | TAP2.4 | 1095 | 1402 |
| Guide 532 | TAP2.5 | 1096 | 1403 |
| Guide 533 | TAP2.6 | 1097 | 1404 |
| Guide 534 | TAP2.7 | 1098 | 1405 |
| Guide 535 | TAP2.8 | 1099 | 1406 |
| Guide 536 | TAP2.9 | 1100 | 1407 |
| tapbp_53; tapbp_18; tapbp_5; tapbp_64; | TAPBP | 1316; 1319; 1321; | 1623; 1626; 1628; 1634; |
| tapbp_79; tapbp_80; TSBTx3663; | (Tapasin) | 1327; 1334; 1336; | 1641; 1643; 1472-1489 |
| TSBTx3663; TSBTx3664; TSBTx3664; | | 1165-1182 | |
| TSBTx3665; TSBTx3666; TSBTx3667; | | | |
| TSBTx3668; TSBTx3669; TSBTx3670; | | | |
| TSBTx3671; TSBTx3672; TSBTx3673; | | | |
| TSBTx3674; TSBTx3675; TSBTx3676; | | | |
| TSBTx3677; TSBTx3678 | | | |

TABLE 2A
Exemplary Spacer Sequences. Boldfaced nucleotides represent
nucleotides corresponding to target nucleotides in the target DNA
sequence corresponding to spacer sequences.

| | | | SEQ | |
|---|---|---|---|---|
| gRNA Name | Gene | Spacer Sequence | ID NO | PAM |
| TSBTx1660 | PIM1 | GCUCUCACCGGGCGCCAGCU | 676 | TGG |
| TSBTx1661 | PIM1 | CUCACCGGGCGCCAGCUUGG | 677 | TGG |
| TSBTx1662 | PIM1 | CCCUUUCCUAGGCAAGGAGA | 678 | AGG |
| TSBTx1663 | PIM1 | GCCUAGGAAAGGGGGAAGCA | 679 | CGG |
| TSBTx1664 | PIM1 | CCUGGAGUCGCAGUACCAGG | 680 | TGG |
| TSBTx1665 | PIM1 | GUACCAGGUGGGCCCGCUAC | 681 | TGG |
| TSBTx1666 | PIM1 | CCCACUCACCGGCAAGUUGU | 682 | CGG |
| TSBTx1667 | PIM1 | CCAGGUGGCCAUCAAACACG | 683 | TGG |
| TSBTx1668 | PIM1 | UGAUGGCCACCUGGAAGCCC | 684 | AGG |
| TSBTx1669 | PIM1 | AUGGCCACCUGGAAGCCCAG | 685 | GGG |
| TSBTx1670 | PIM1 | ACUCACCAGCUCUCCCCAGU | 686 | CGG |
| TSBTx1671 | PIM1 | CAUUAGGCUGCAGGGGCGAG | 687 | GGG |
| TSBTx1672 | PIM1 | AUUAGGCUGCAGGGGCGAGG | 688 | GGG |
| TSBTx1673 | PIM1 | GGCAGGUGCUGGAGGCCGUG | 689 | CGG |
| TSBTx1674 | PIM1 | ACCAUCGAAGUCCGUGUAGA | 690 | CGG |
| TSBTx1675 | PIM1 | CUCGGGUCCCUGUGAGCCAA | 691 | GGG |
| TSBTx1676 | PIM1 | GCCAGGUUUUCUUCAGGCAG | 692 | AGG |
| TSBTx1677 | PIM1 | GCUGACAUUCUGCAGAAAGG | 693 | AGG |
| TSBTx1678 | PIM1 | AAUGUCAGCAUCUCAUUAGA | 694 | TGG |
| TSBTx1679 | PIM1 | GCAAGAUGUUCUCCUGCCCC | 695 | AGG |
| TSBTx1680 | RNF20 | GCAAACCAAAAAUCGCAAGC | 696 | TGG |
| TSBTx1681 | RNF20 | UAGCUACCUGACUCCAGUAU | 697 | CGG |
| TSBTx1682 | RNF20 | UCAUCAAACUGGAGAAGGGU | 698 | AGG |
| TSBTx1683 | RNF20 | GUCUCAGCUGCAGGAACGUG | 699 | TGG |
| TSBTx1684 | RNF20 | GAUAAAUUGCAAGAAAAAG | 700 | TGG |
| TSBTx1685 | RNF20 | CACCUCCACUGUUUAGCUUC | 701 | CGG |
| TSBTx1686 | RNF20 | UUCCCCAGAUAAUCUGAUAG | 702 | TGG |
| TSBTx1687 | RNF20 | CCCAGAUAAUCUGAUAGUGG | 703 | AGG |
| TSBTx1688 | RNF20 | UCCUCGCACAGGAGAAUAUG | 704 | AGG |
| TSBTx1689 | RNF20 | GUUAAGUACCUCCUGAGACA | 705 | TGG |
| TSBTx1690 | RNF20 | UCUCUGUAGGUGAAUUCCAA | 706 | AGG |
| TSBTx1691 | RNF20 | UCAGAACCGUCUCUGUGAGC | 707 | TGG |
| TSBTx1692 | RNF20 | ACUUCGGCAAGACUUUGAGG | 708 | AGG |
| TSBTx1693 | RNF20 | UACACAAAAUGAAAAGCUGA | 709 | AGG |
| TSBTx1694 | RNF20 | GCCCUCCUAAGGUGGAAUUG | 710 | CGG |
| TSBTx1695 | RNF20 | CCUACAGUUGAAAGCACACU | 711 | TGG |
| TSBTx1696 | RNF20 | GCACCAGGUUGAGCUUAUUG | 712 | AGG |
| TSBTx1697 | RNF20 | UACCUCAAUAAGCUCAACC | 713 | TGG |
| TSBTx1698 | RNF20 | AUCUCGCUACACACAGAUAA | 714 | AGG |
| TSBTx2810 | CD70 | GGCGAUGCCGGAGGAGGGUU | 715 | CGG |
| TSBTx2811 | CD70 | CGGUGCGGCGCAGGCCCUAU | 716 | GGG |
| TSBTx2812 | CD70 | UCGGUGCGGCGCAGGCCCUA | 717 | TGG |
| TSBTx2813 | CD70 | CUCACCCCAAGUGACUCGAG | 718 | CGG |
| TSBTx2814 | CD70 | UCCUGGGGGCACAGGGUUAG | 719 | AGG |
| TSBTx2815 | CD70 | CAGGACCUCAGCAGGACCCC | 720 | AGG |
| TSBTx2816 | CD70 | GGUACACAUCCAGGUGACGC | 721 | TGG |
| TSBTx2817 | SIRT1 | UUUGCAGAUAACCUUCUGUU | 722 | CGG |
| TSBTx2818 | SIRT1 | GCCAUACCUAUCCGUGGCCU | 723 | TGG |
| TSBTx2819 | SIRT1 | GACCUACAAUAAGGGGGAAA | 724 | AGG |
| TSBTx2820 | SIRT1 | ACAGACACCUAAAAUGUGCA | 725 | TGG |
| TSBTx2821 | SIRT1 | UUUUAGGUGUCUGUUUCAUG | 726 | TGG |
| TSBTx2822 | SIRT1 | UAUUUCCUGUAUCAAGCAAA | 727 | TGG |
| TSBTx2823 | SIRT1 | UUGAUACAGGAAAUAUAUCC | 728 | TGG |
| TSBTx2824 | SIRT1 | AACAGGUUGCGGGAAUCCAA | 729 | AGG |
| TSBTx2825 | SIRT1 | CAAAGGAUAAUUCAGUGUCA | 730 | TGG |
| TSBTx2826 | SIRT1 | ACGAGGAGAUAUUUUUAAUC | 731 | AGG |
| TSBTx2827 | SIRT1 | ACCUACAUAUUUUCAGAUUU | 732 | TGG |
| TSBTx2828 | SIRT1 | UUACUUGGAAUUAGUGCUAC | 733 | TGG |
| TSBTx2829 | SIRT1 | AAUUCCAAGUAAGUUGGUGA | 734 | TGG |
| TSBTx2830 | SIRT1 | CACAGGAAGUACAAACUUCU | 735 | AGG |
| TSBTx2831 | SIRT1 | UGCUGAACAGAUGGAAAAUC | 736 | CGG |
| TSBTx2853 | RNF20 | AAUUCAGCUAGAAGAUACAU | 737 | TGG |
| TSBTx3325 | FOXP3 | UCUACGCAGCCUGCCCUUGGAC | 738 | ATTG |
| TSBTx3326 | FOXP3 | GCUGGGACAUGUCCCGAGGGGC | 739 | ATTG |
| TSBTx3327 | FOXP3 | UCUUGGCCCUGCAACAUCUGCA | 740 | ATTT |
| TSBTx3328 | FOXP3 | CCCUCAUAGAGGACACAUCCAC | 741 | ATTG |
| TSBTx3329 | FOXP3 | UCUCAUUGAUACCUCUCACCUC | 742 | ATTA |
| TSBTx3330 | FOXP3 | AUACCUCUCACCUCUGUGGUGA | 743 | ATTG |
| TSBTx3331 | FOXP3 | CUUCCCCUCACCACAGAGGUGA | 744 | ATTT |
| TSBTx3332 | FOXP3 | UCAGAUGACUCGUAAAGGGCAA | 745 | ATTT |
| TSBTx3333 | FOXP3 | UGGGUUUUUUUCUUUGCCCUUU | 746 | ATTT |
| TSBTx3334 | FOXP3 | UGAAAUUUUGGGUUUUUUUCUU | 747 | ATTT |
| TSBTx3335 | FOXP3 | UGAGACUUAAACGGAAAUUUUG | 748 | ATTA |
| TSBTx3336 | FOXP3 | CAAAAUUUCCGUUUAAGUCUCA | 749 | ATTT |
| TSBTx3337 | FOXP3 | CCGUUUAAGUCUCAUAAUCAAG | 750 | ATTT |
| TSBTx3353 | RNF20 | CCAAUUCCUGACAUUUUGGCAG | 751 | ATTT |
| TSBTx3354 | RNF20 | GAAAUAAAAGAGCAGCUGGAGA | 752 | ATTG |
| TSBTx3355 | RNF20 | AGGGACCACAGUGGAAACAAUU | 753 | ATTC |
| TSBTx3356 | RNF20 | UUUCCACUGUGGUCCCUGAAUC | 754 | ATTG |
| TSBTx3357 | RNF20 | AGCUAGGAGGUGUCUCUUCAAC | 755 | ATTA |
| TSBTx3358 | RNF20 | GAACACUGCAAACCAAAAAUCG | 756 | ATTA |
| TSBTx3359 | RNF20 | UUGGUUUGCAGUGUUCUAAUGU | 757 | ATTT |
| TSBTx3360 | RNF20 | CUGCCAGCUUGCGAUUUUUGGU | 758 | ATTT |
| TSBTx3361 | RNF20 | AAGAUGAACUUCGUGAGCACAU | 759 | ATTG |
| TSBTx3362 | RNF20 | AAAAACUGGAACGACGACAGGC | 760 | ATTG |
| TSBTx3363 | RNF20 | AUUGUCAACCGAUACUGGAGUC | 761 | ATTG |
| TSBTx3364 | RNF20 | UCAACCGAUACUGGAGUCAGGU | 762 | ATTG |
| TSBTx3365 | RNF20 | CUAUCAGAGUCUGGUUCUGGUU | 763 | ATTG |
| TSBTx3366 | RNF20 | AUCAUAAACAGUCACAAUCUGG | 764 | ATTT |
| TSBTx3367 | RNF20 | UGACUGUUUAUGAUAAAUUGCA | 765 | ATTG |
| TSBTx3368 | RNF20 | CAAGAAAAAGUGGAGCUCUUAU | 766 | ATTG |
| TSBTx3369 | RNF20 | UCCUGUGCGAGGAAAGAGUUCA | 767 | ATTC |
| TSBTx3370 | RNF20 | CUGUAGCCUCAUAUUCUCCUGU | 768 | ATTC |
| TSBTx3371 | RNF20 | ACAGAUCUUCUUCAGGAAAAGC | 769 | ATTG |
| TSBTx3372 | RNF20 | GGCUGUCUCCACUUUACUCUGC | 770 | ATTC |
| TSBTx3373 | RNF20 | AUGACCUGCAGUGGGAUAUUGA | 771 | ATTG |
| TSBTx3374 | RNF20 | UGUCAAUAUCCCACUGCAGGUC | 772 | ATTT |
| TSBTx3375 | RNF20 | ACAAAAUUCGAAAGAGGGAACA | 773 | ATTG |
| TSBTx3376 | RNF20 | GAAAGAGGGAACAGCGACUCAA | 774 | ATTC |
| TSBTx3377 | RNF20 | UUGGUUUGCAGUGUUCGAAUGU | 775 | ATTT |
| TSBTx3378 | RNF20 | AUCAUAGACAGUCACAAUCUGG | 776 | ATTT |
| TSBTx3379 | RNF20 | UGACUGUCUAUGAUAAAUUGCA | 777 | ATTG |
| TSBTx3380 | RNF20 | CAAGAAAAAGUGGAACUCUUAU | 778 | ATTG |
| TSBTx3633 | CD48 | AAGCAUGUGCUCCAGAGGUU | 779 | GGG |
| TSBTx3634 | CD48 | GAAGCAUGUGCUCCAGAGGU | 780 | TGG |
| TSBTx3635 | CD48 | UUCUUACCCAGGGUACAGGG | 781 | TGG |
| TSBTx3636 | CD48 | CGACCAGAAGAUUGUAGAAU | 782 | GGG |
| TSBTx3637 | CD48 | UCGACCAGAAGAUUGUAGAA | 783 | TGG |
| TSBTx3638 | CD48 | AAUCCCAUUCUACAAUCUUC | 784 | TGG |
| TSBTx3639 | CD48 | UGCAAUCCAUUCUACUCCAA | 785 | AGG |
| TSBTx025 | PD-1 | CACCUACCUAAGAACCAUCCUGG | 786 | TGG |
| TSBTx845 | B2M | ACUCACGCUGGAUAGCCUCC | 787 | AGG |
| TSBTx1105 | CHIP | CGCGCAGGAGCUCAAGGAGC | 788 | |
| TSBTx1109 | CHIP | CGGGUCUAGGGACCAAGGCC | 789 | |
| TSBTx1110 | CHIP | CCGGGUCUAGGGACCAAGGC | 790 | |
| TSBTx1113 | CHIP | GAAGAUGCAGCAGCACGAGC | 791 | |
| TSBTx1114 | CHIP | GCAGCAGCACGAGCAGGCCC | 792 | |
| TSBTx1116 | CHIP | GGGGCAGUGCCAGCUGGAGA | 793 | |
| TSBTx1117 | CHIP | GGCAGUGCCAGCUGGAGA | 794 | |
| TSBTx1118 | CHIP | CAGCCAACCUCGCUGCAGAU | 795 | |
| TSBTx1122 | CHIP | AGGAGCAGCGGCUGAACUUC | 796 | |
| TSBTx1121 | CHIP | AAGGAGCAGCGGCUGAACUU | 797 | |
| TSBTx1124 | CHIP | GUCCCACCUCUCACGCUCCG | 798 | |
| TSBTx1129 | CHIP | GGCCCAGCAGGCCUGCAUUG | 799 | |
| TSBTx1130 | CHIP | CACGUGCUUGGCCUCAAUGC | 800 | |
| TSBTx1133 | CHIP | UUUCUCAGGUGGAUGAGAAG | 801 | |
| TSBTx1136 | CHIP | ACACGCUGCAGUGACAAGAA | 802 | |
| TSBTx1137 | CHIP | CACACGCUGCAGUGACAAGA | 803 | |
| TSBTx1107 | CHIP | GGGCCGAAAGUACCCGGAGG | 804 | |
| TSBTx1108 | CHIP | CACGAUCGCGCGGCCGUAGC | 805 | |
| TSBTx1111 | CHIP | UCCCUAGACCCGGAACCCGC | 806 | |
| TSBTx1112 | CHIP | CUAGACCCGGAACCCGCUGG | 807 | |
| TSBTx1120 | CHIP | CCCAGCUUACAGCCUGGCCA | 808 | |
| TSBTx1131 | CHIP | CUCUUCACAGGACAAGUACA | 809 | |
| TSBTx1106 | CHIP | GCGCAGGAGCUCAAGGAGC | 810 | |
| TSBTx1153 | BRINP1 | GACAGACCAACAUGUCUCCA | 811 | |
| TSBTx1152 | BRINP1 | UUACCUGUAUAUUUUAUAUC | 812 | |
| TSBTx1151 | BRINP1 | UGCCCAGGGAGUUUGCCCGU | 813 | |
| TSBTx1149 | BRINP1 | CUUCCAACGGGCAAACUCCC | 814 | |
| TSBTx1150 | BRINP1 | UUCCAACGGGCAAACUCCCU | 815 | |
| TSBTx1148 | BRINP1 | CAUGAGAUCCAGAUAUCAAC | 816 | |
| TSBTx1147 | BRINP1 | CCUUCAAGGUAGGAAGCCAG | 817 | |
| TSBTx1146 | BRINP1 | ACUCUCUACCUGAAUUCUCC | 818 | |
| TSBTx1145 | BRINP1 | ACUCAUCUAGUGAGAGACAA | 819 | |
| TSBTx1144 | BRINP1 | GCUCCUGCAGAGUGCCACGG | 820 | |
| TSBTx1142 | BRINP1 | CUUACCUCUCUCUAGGCAGC | 821 | |
| TSBTx1143 | BRINP1 | ACCACCAGCUGCCUAGAGAG | 822 | |
| TSBTx1140 | BRINP1 | CUCCCAGGACAAUUCAGCAG | 823 | |
| TSBTx1141 | BRINP1 | UGAAUUGUCCUGGGAGAUAA | 824 | |
| TSBTx1139 | BRINP1 | AAGCCACUGCUGAAUUGUCC | 825 | |
| TSBTx1083 | JNK1 | UAUCAGAAUUUAAAACCUAU | 826 | |
| TSBTx1084 | JNK1 | CAGGAGCUCAAGGAAUAGUA | 827 | |
| TSBTx1086 | JNK1 | GAAUCAGACUCAUGCCAAGC | 828 | |
| TSBTx1085 | JNK1 | AGAAUCAGACUCAUGCCAAG | 829 | |
| TSBTx1087 | JNK1 | CUUCUCUAUCAGAUGCUGUG | 830 | |
| TSBTx1088 | JNK1 | UAUAGUGGAUUUAUGGUCUG | 831 | |
| TSBTx1089 | JNK1 | UACAGUCCCUUCCUGGAAAG | 832 | |
| TSBTx1090 | JNK1 | ACAAGGAUACAGUCCCUUCC | 833 | |
| TSBTx1091 | JNK1 | UCAGUUGACAUUUGGUCAGU | 834 | |
| TSBTx1092 | JNK1 | AUAAGGAUACGAUCUGUACC | 835 | |
| TSBTx1093 | JNK1 | UGAUAUUAGAUAUUGAUCAG | 836 | |
| TSBTx1094 | JNK1 | AGAAACUGCAACCAACAGUA | 837 | |
| TSBTx1096 | JNK1 | UGUUUGCAGCCAGUCAGGCA | 838 | |
| TSBTx1095 | JNK1 | CUGACUGGCUGCAAACAUAA | 839 | |
| TSBTx1097 | JNK1 | CUUACAGCUUCUGCUUCAGA | 840 | |
| TSBTx1098 | JNK1 | GGUGGUGGCUGAAAAACACA | 841 | |
| TSBTx1100 | JNK1 | UGACAAGCAGUUAGAUGAAA | 842 | |
| TSBTx1099 | JNK1 | CUGACAAGCAGUUAGAUGAA | 843 | |
| TSBTx1101 | JNK1 | UUUUACAGAAUUGAUAUAUA | 844 | |
| TSBTx1102 | JNK1 | CGGGGGCAGCCCUCUCCUUU | 845 | |
| TSBTx1103 | JNK1 | UGUAACCAACCUAAAGGAGA | 846 | |
| TSBTx1104 | JNK1 | ACAGGUGCAGCAGUGAUCAA | 847 | |
| TSBTx1082 | PRKCQ | GGGUCCUGCCAGUCUUGUCA | 848 | |
| TSBTx1081 | PRKCQ | CUGCCAGUCUUGUCAGGGCG | 849 | |
| TSBTx1079 | PRKCQ | GCUGUCCCAGGGUGGGUACA | 850 | |
| TSBTx1080 | PRKCQ | UCCCAGGGUGGGUACAUGGU | 851 | |
| TSBTx1078 | PRKCQ | GUCAUGCAGAUCAUUGUGAA | 852 | |
| TSBTx1075 | PRKCQ | UUGUGUCUACAGGAAGAGAG | 853 | |
| TSBTx1076 | PRKCQ | UGUGUCUACAGGAAGAGAGA | 854 | |
| TSBTx1077 | PRKCQ | GUGUCUACAGGAAGAGAGAG | 855 | |
| TSBTx1074 | PRKCQ | UACUGUACCAGACAAACUCG | 856 | |
| TSBTx1073 | PRKCQ | UUACAGGGGCCUGAACAAAC | 857 | |
| TSBTx1072 | PRKCQ | UACAGGGGCCUGAACAAACA | 858 | |
| TSBTx1071 | PRKCQ | CCAGUGCCGACGUAAGUAAG | 859 | |
| TSBTx1070 | PRKCQ | CAGUGCCGACGUAAGUAAGA | 860 | |
| TSBTx1069 | PRKCQ | AAAUACUCACCAUGGUUUCU | 861 | |
| TSBTx1068 | PRKCQ | GGAACUGAAAGAAAGGCAGA | 862 | |
| TSBTx1067 | PRKCQ | CGGCAAGGACUCAAGUGUGA | 863 | |
| TSBTx1066 | PRKCQ | UCAUAGAUGCCAGACAAAGG | 864 | |
| TSBTx1065 | PRKCQ | ACAGGUAGGAGCAUGUGCCG | 865 | |
| TSBTx1064 | PRKCQ | ACUGAACAGAUCUUCAGAGA | 866 | |
| TSBTx1063 | PRKCQ | CUACCUCUUUUUCCCGGUGU | 867 | |
| TSBTx1062 | PRKCQ | CAGAGCCUCAGGGCAUUUCC | 868 | |
| TSBTx1061 | PRKCQ | AGAGCCUCAGGGCAUUUCCU | 869 | |
| TSBTx1060 | PRKCQ | GCAGAUUAAACUAAAAAUUG | 870 | |
| TSBTx1059 | PRKCQ | CAAUCAAUUUUUCGCAAUAA | 871 | |
| TSBTx1058 | PRKCQ | GUACAUUCCAGACCAAGGUA | 872 | |
| TSBTx1057 | PRKCQ | CCUCUUACGUCGCUCUGGAA | 873 | |
| TSBTx1056 | PRKCQ | ACCUGGGGGAAGGAGAACCA | 874 | |
| TSBTx1055 | PRKCQ | CUGCAGUUCCUUCAUUCCAA | 875 | |
| TSBTx1054 | PRKCQ | UUACCUGUAGACUAUUCCUU | 876 | |
| TSBTx1053 | PRKCQ | ACCUCUGGGGCGAUGUAGUC | 877 | |
| TSBTx1115 | CHIP1 | AGCAGGCCCUGGCCGACUGC | 878 | |
| TSBTx1119 | CHIP1 | GGCUGUAAGCUGGGGAACGG | 879 | |
| TSBTx1123 | CHIP1 | GGAGCAGCGGCUGAACUUCG | 880 | |
| TSBTx1126 | CHIP1 | CAGCUCCCUGGGGGUUGACC | 881 | |
| TSBTx1125 | CHIP1 | CCUGGGGGUUGACCAGGAGC | 882 | |
| TSBTx1127 | CHIP1 | AGAGUGCCAGCGAAACCACG | 883 | |
| TSBTx1128 | CHIP1 | GAGUGCCAGCGAAACCACGA | 884 | |
| TSBTx1132 | CHIP1 | UUCACAGGACAAGUACAUGG | 885 | |
| TSBTx1134 | CHIP1 | GUCUCGCUUCUGUGGCACAG | 886 | |
| TSBTx1135 | CHIP1 | GCACCUGCAGGUGAGGCCUG | 887 | |
| TSBTx1138 | CHIP1 | GGAACAGCUCAUCCCCAACU | 888 | |
| TSBTx3338 | STUB1 (CHIP) | CCCUGCUCCUUGAGCUCCUGCG | 889 | ATTG |
| TSBTx3339 | STUB1 (CHIP) | CACCAACCGGGCCUUGUGCUAC | 890 | ATTA |
| TSBTx3340 | STUB1 (CHIP) | GCGAUGGCCUCAUCAUAGCUCU | 891 | ATTG |
| TSBTx3341 | STUB1 (CHIP) | GAAGAGCGCUGGGGAUGUCGUC | 892 | ATTC |
| TSBTx3342 | STUB1 (CHIP) | AGGAGCGGCGCAUCCACCAGGA | 893 | ATTG |
| TSBTx3343 | STUB1 (CHIP) | CCGCGGAGCGUGAGAGGUGGGA | 894 | ATTG |
| TSBTx3344 | STUB1 (CHIP) | AGGCCAAGCACGUGAGGGUGCC | 895 | ATTG |
| TSBTx3345 | STUB1 (CHIP) | UGACCCCGUGACCCGGAGCCCC | 896 | ATTT |
| TSBTx3346 | STUB1 (CHIP) | ACGCAUUCAUCUCUGAGAAUGG | 897 | ATTG |
| TSBTx3347 | STUB1 (CHIP) | AUCUCUGAGAAUGGCUGGGUGG | 898 | ATTC |
| TSBTx3348 | STUB1 (CHIP) | UCAGAGAUGAAUGCGUCAAUAA | 899 | ATTC |
| TSBTx3349 | STUB1 (CHIP) | CACCAACCGUGCCCUGUGCUAC | 900 | ATTA |
| TSBTx3350 | STUB1 (CHIP) | CAGCGCUUCUUCUUCGCGAUUC | 901 | ATTC |
| TSBTx3351 | STUB1 (CHIP) | AGGCUAAGCAUGUGAGGGUGCC | 902 | ATTG |
| TSBTx3352 | STUB1 (CHIP) | UCAGAGAUGAAUGCGUCAAUGA | 903 | ATTC |
| TSBTx3353 | RNF20 | CCAAUUCCUGACAUUUUGGCAG | 904 | ATTT |
| TSBTx3354 | RNF20 | GAAAUAAAAGAGCAGCUGGAGA | 905 | ATTG |
| TSBTx3355 | RNF20 | AGGGACCACAGUGGAAACAAUU | 906 | ATTC |
| TSBTx3356 | RNF20 | UUUCCACUGUGGUCCCUGAAUC | 907 | ATTG |
| TSBTx3357 | RNF20 | AGCUAGGAGGUGUCUCUUCAAC | 908 | ATTA |
| TSBTx3358 | RNF20 | GAACACUGCAAACCAAAAAUCG | 909 | ATTA |
| TSBTx3359 | RNF20 | UUGGUUUGCAGUGUUCUAAUGU | 910 | ATTT |
| TSBTx3360 | RNF20 | CUGCCAGCUUGCGAUUUUUGGU | 911 | ATTT |
| TSBTx3361 | RNF20 | AAGAUGAACUUCGUGAGCACAU | 912 | ATTG |
| TSBTx3362 | RNF20 | AAAAACUGGAACGACGACAGGC | 913 | ATTG |
| TSBTx3363 | RNF20 | AUUGUCAACCGAUACUGGAGUC | 914 | ATTG |
| TSBTx3364 | RNF20 | UCAACCGAUACUGGAGUCAGGU | 915 | ATTG |
| TSBTx3365 | RNF20 | CUAUCAGAGUCUGGUUCUGGUU | 916 | ATTG |
| TSBTx3366 | RNF20 | AUCAUAAACAGUCACAAUCUGG | 917 | ATTT |
| TSBTx3367 | RNF20 | UGACUGUUUAUGAUAAAUUGCA | 918 | ATTG |
| TSBTx3368 | RNF20 | CAAGAAAAAGUGGAGCUCUUAU | 919 | ATTG |
| TSBTx3369 | RNF20 | UCCUGUGCGAGGAAAGAGUUCA | 920 | ATTC |
| TSBTx3370 | RNF20 | CUGUAGCCUCAUAUUCUCCUGU | 921 | ATTC |
| TSBTx3371 | RNF20 | ACAGAUCUUCUUCAGGAAAAGC | 922 | ATTG |
| TSBTx3372 | RNF20 | GGCUGUCUCCACUUUACUCUGC | 923 | ATTC |
| TSBTx3373 | RNF20 | AUGACCUGCAGUGGGAUAUUGA | 924 | ATTG |
| TSBTx3374 | RNF20 | UGUCAAUAUCCCACUGCAGGUC | 925 | ATTT |
| TSBTx3375 | RNF20 | ACAAAAUUCGAAAGAGGGAACA | 926 | ATTG |
| TSBTx3376 | RNF20 | GAAAGAGGGAACAGCGACUCAA | 927 | ATTC |
| TSBTx3377 | RNF20 | UUGGUUUGCAGUGUUCGAAUGU | 928 | ATTT |
| TSBTx3378 | RNF20 | AUCAUAGACAGUCACAAUCUGG | 929 | ATTT |
| TSBTx3379 | RNF20 | UGACUGUCUAUGAUAAAUUGCA | 930 | ATTG |
| TSBTx3380 | RNF20 | CAAGAAAAAGUGGAACUCUUAU | 931 | ATTG |
| Guide 415 | B2M | ACUCACGCUGGAUAGCCUCC | 932 | |
| Guide 416 | B2M | CACAGCCCAAGAUAGUUAAG | 933 | |
| Guide 417 | B2M | ACAGCCCAAGAUAGUUAAGU | 934 | |
| Guide 418 | B2M | CAGCCCAAGAUAGUUAAGUG | 935 | |
| Guide 419 | B2M | UUACCCCACUUAACUAUCUU | 936 | |
| Guide 420 | B2M | CUUACCCCACUUAACUAUCU | 937 | |
| Guide 421 | B2M | UCGAUCUAUGAAAAAGACAG | 938 | |
| Guide 422 | B2M | CUCACGCUGGAUAGCCUCC | 939 | |
| Guide 423 | B2M | UCACGCUGGAUAGCCUCC | 940 | |
| Guide 424 | B2M | CGCGAGCACAGCUAAGGCCA | 941 | |
| Guide 425 | B2M | GAGUAGCGCGAGCACAGCUA | 942 | |
| Guide 426 | B2M | GCUACUCUCUCUUUCUGGCC | 943 | |
| Guide 427 | B2M | CGUGAGUAAACCUGAAUCUU | 944 | |
| Guide 428 | B2M | UUUGACUUUCCAUUCUCUGC | 945 | |
| Guide 429 | B2M | ACCCAGACACAUAGCAAUUC | 946 | |
| Guide 430 | B2M | AAGUCAACUUCAAUGUCGGA | 947 | |
| Guide 431 | B2M | CAGUAAGUCAACUUCAAUGU | 948 | |
| Guide 432 | B2M | GAAGUUGACUUACUGAAGAA | 949 | |
| Guide 433 | B2M | UGGAGAGAGAAUUGAAAAAG | 950 | |
| Guide 434 | B2M | UUCAGACUUGUCUUUCAGCA | 951 | |
| Guide 435 | B2M | ACUUGUCUUUCAGCAAGGAC | 952 | |
| Guide 436 | B2M | AUACUCAUCUUUUUCAGUGG | 953 | |
| Guide 437 | B2M | CAUACUCAUCUUUUUCAGUG | 954 | |
| Guide 438 | B2M | GCAUACUCAUCUUUUUCAGU | 955 | |
| Guide 439 | B2M | GGCAUACUCAUCUUUUUCAG | 956 | |
| Guide 440 | B2M | AGUCACAUGGUUCACACGGC | 957 | |
| Guide 441 | B2M | ACAAAGUCACAUGGUUCACA | 958 | |
| Guide 442 | B2M | UGGGCUGUGACAAAGUCACA | 959 | |
| CD58.1 | CD58 | GCAACCAUGGCUCGUCGGGC | 960 | CGG |
| CD58.2 | CD58 | ACUCACCAAAGCAGUGCAGC | 961 | AGG |
| (TSBTx2834) | | | | |
| CD58.3 | CD58 | CUCACCGCUGCUUGGGAUAC | 962 | AGG |

TABLE 2B
Exemplary Spacer Sequences. In the following table, the right portion
of the table is a continuation of the bottom of the left portion.

| Target | SEQ ID NOs for Spacers | Target | SEQ ID NOs for Spacers |
|---|---|---|---|
| ACAT1 | 3251-3261 | LDHA | 2335-2337 |
| ACLY | 1778-1799 | LDLR | 2888 |
| ADORA2A | 1800-1811 | LIF | 2338-2344 |
| AKT1 | 1674-1677 | LYN | 2345-2356 |
| AKT2 | 1678; 1679 | MAP4K4 | 2357-2388 |
| AXL | 1812-1839 | MAPK14 | 2389-2405 |
| B2M | 2883; 2885; 2889; 3057-3060 | MCJ | 3309 |
| BATF | 1841-1847 | MEF2D | 2406-2424 |
| BCL2L11 | 1848-1853 | MGAT5 | 2425-2439 |
| BLIMP1 | 1680-1684 | NFATC1 | 1649-1661 |
| BTLA | 3052-3056 | NFATC2 | 1662-1672 |
| CAMK2D | 1854-1865 | NFATC4 | 1673 |
| cAMP | 1866-1870 | NR4A1 | 3271-3289 |
| CASP8 | 1871-1876 | NR4A2 | 3290-3300 |
| CBLB | 2887; 3031-3051 | NR4A3 | 3301-3308 |
| CBL-B | 1688-1692 | NT5E (CD73) | 2440-2449 |
| CCR5 | 1877-1880 | ODC1 | 2450-2456 |
| CD123 | 3199-3224 | OTULINL (FAM105A) | 2457-2469 |
| CD160 | 1973-1978 | PAG1 | 2470-2478 |
| CD2 | 1760-1767; 1881-1883 | PD-1 (PDCD1) | 1697; 1698; 1768-1773; |
| | | | 2981-2994; 1323; 1324 |
| CD244 | 1979-1986 | PDIA3 | 2479-2486 |
| CD276 | 1987-1998 | PHD1 (EGLN2) | 2487-2502 |
| CD33 | 3169-3193 | PHD2 (EGLN1) | 2503-2507 |
| CD38 | 1942-1951 | PHD3 (EGLN3) | 2508-2517 |
| CD3D | 1884-1891 | PIK3CD | 2518-2581 |
| CD3E | 1892-1906 | PIKFYVE | 2582-2597 |
| CD3G | 1907-1918 | PPARa | 2598-2607 |
| CD4 | 1919-1929 | PPARd | 2608-2626 |
| CD5 | 1718-1759; 1930-1935 | PRDMI1 | 2627-2637 |
| CD52 | 3194-3198; 2882 | PRKACA | 2638-2661 |
| CD7 | 2881; 2886; 3160-3168 | PTEN | 2662-2666 |
| CD70 | 1952-1958 | PTPN11 | 2698-2700 |
| CD82 | 1959-1966 | PTPN2 | 2667-2669 |
| CD86 | 1967-1972 | PTPN6 | 2670-2697 |
| CD8A | 1936-1941 | PVRIG (CD112R) | 2953-2980 |
| CD96 | 3015-3030 | RASA2 | 2701-2710 |
| CDK4 | 1712 | RFXANK | 2933-2952 |
| CDK8 | 1999-2005 | SELPG/PSGL1 | 3310-3318 |
| CDKN1B | 2006-2014 | SHP1 | 1693 |
| Chi3l1 | 2996-3014 | SIGLEC15 | 2711-2725 |
| CIITA | 3104-3159; 2884 | SLA | 2726-2732 |
| CISH | 3237-3250 | SLAMF7 | 2733-2740 |
| CSF2 | 2015-2020 | SMARCA4 | 1702-1711 |
| CSK | 2021-2035 | SOCS1 | 2741; 2742 |
| CTLA-4 | 2036-2045; 2995 | Spry1 | 3091-3103 |
| CUL3 | 2046-2053 | STK4 | 2743-2748 |
| Cyp11a1 | 2054-2065 | SUV39H1 | 2749-2755 |
| DCK | 2066-2077 | TET2 | 1699-1701; 3061-3090 |
| DGKA | 2078-2098 | TGFbRII | 2925-2932; 3319-3322 |
| DGKZ | 2099-2148 | TIGIT | 2919-2924 |
| DHX37 | 2149-2194 | Tim-3 | 2910-2918 |
| ELOB (TCEB2) | 2195-2199 | TMEM222 | 2756-2769 |
| ENTPD1 (CD39) | 2200-2216 | TNFAIP3 | 2770-2775 |
| FADD | 2217-2223 | TNFRSF10B | 2806-2812 |
| GATA3 | 3262-3270 | TNFRSF8 (CD30) | 2776-2805 |
| GCN2 kinase (IDO pathway) | 1685-1687 | TOX | 2813-2832 |
| IL10 | 2248-2252 | TOX2 | 2833-2859 |
| IL10RA | 2253-2271 | TRAC | 1774-1777; 2907-2909 |
| IL6 | 2224-2236 | TRBC1/2 | 3225-3236 |
| IL6R | 2237-2247 | UBASH3A | 2860-2872 |
| IRF4 | 1694-1696; 2272-2311 | VHL | 2873-2879 |
| JUNB | 2312-2322 | VISTA | 2890-2906 |
| LAIR-1 (CD305) | 2323-2334 | XBP1 | 2880 |
| | | ZAP70 | 1713-1717 + C54AA1:D65 |

TABLE 2C
Exemplary Target Sequences.

| Guide Name | PAM | gRNA Target + PAM (bold) | SEQ ID NO |
|---|---|---|---|
| TSBTx4186 (846) | TGG | TGACGGCCATCCTCGGCGTCTGG | 3325 |
| TSBTx4187 (847) | GGG | GACGGCCATCCTCGGCGTCTGGG | 3326 |
| TSBTx4188 (848) | GGG | ACGGCCATCCTCGGCGTCTGGGG | 3327 |
| TSBTx4189 (849) | TGG | CGCACTCACCCGCCCAGGTCTGG | 3328 |
| TSBTx4190 (850) | GGG | GCACTCACCCGCCCAGGTCTGGG | 3329 |
| TSBTx4191 (851) | AGG | CCCAGGCTCGCACTCCATGAGG | 3330 |
| TSBTx4192 (852) | TGG | GTCACTCACCGGCCTCGCTCTGG | 3331 |
| TSBTx4193 (853) | AGG | CCTTACCCCATCTCAGGGTGAGG | 3332 |
| TSBTx4194 (854) | GGG | CTTACCCCATCTCAGGGTGAGGG | 3333 |
| TSBTx4195 (855) | AGG | GGCTCTGGGAAAAGAGGGGAAGG | 3334 |
| TSBTx4196 (856) | AGG | CTTCCCACAGATAGAAAAGGAGG | 3335 |
| TSBTx4197 (857) | GGG | TTCCCACAGATAGAAAAGGAGGG | 3336 |
| TSBTx4198 (858) | AGG | CCCAGGCAGTGACAGTGCCCAGG | 3337 |
| TSBTx4199 (859) | GGG | CCAGGCAGTGACAGTGCCCAGGG | 3338 |
| TSBTx4200 (860) | AGG | GACCCGCATCTCGGCGTCTGAGG | 3339 |
| TSBTx4201 (861) | CGG | GCACTCACCGGCCCAGGTCTCGG | 3340 |
| TSBTx4202 (862) | GGG | TGGGAGCCTGGGGGCGAGGAGGG | 3341 |
| TSBTx4203 (863) | GGG | GGGAGCCTGGGGGCGAGGAGGGG | 3342 |
| TSBTx4204 (864) | AGG | CCCCAGGCTCCCACTCCATGAGG | 3343 |
| TSBTx4205 (865) | GGG | TTACCCCATCTCAGGGTGAGGGG | 3344 |
| TSBTx4206 (866) | GGG | TTCCCACAGGTGGAAAAGGAGGG | 3345 |
| TSBTx4207 (867) | GGG | TGACCCGCATCTCGGCGTCTGGG | 3346 |
| TSBTx4208 (868) | CGG | GCACTCACAGGCCCAGGTCTCGG | 3347 |
| TSBTx4209 (869) | AGG | CACAGGCCCAGGTCTCGGTCAGG | 3348 |
| TSBTx4210 (870) | TGG | AGACCCTGGCCCCGCCCCCGTGG | 3349 |
| TSBTx4211 (871) | AGG | GGCTCTGGGAAAGGAGGGGAAGG | 3350 |
| TSBTx4212 (872) | AGG | CCCAGCCAGCAACAGTGCCCAGG | 3351 |
| TSBTx4167 (873) | ATTG | ATTGGGACCGGGAGACACAGAAGTAC | 3352 |
| TSBTx4168 (874) | ATTA | ATTACATCGCCCTGAACGAGGACCTG | 3353 |
| TSBTx4169 (875) | ATTA | ATTACATCGCCCTGAACGAGGATCTG | 3354 |
| TSBTx4170 (876) | ATTG | ATTGTTGCTGGCCTGGCTGTCCTAGC | 3355 |
| TSBTx4168 (877) | ATTA | ATTACATCGCCCTGAACGAGGACCTG | 3356 |

### Nucleobase Editors

[0252] Useful in the methods and compositions described herein are nucleobase editors that edit, modify or alter a target nucleotide sequence of a polynucleotide. Nucleobase editors described herein typically include a polynucleotide programmable nucleotide binding domain and a nucleobase editing domain (e.g., adenosine deaminase, cytidine deaminase). A polynucleotide programmable nucleotide binding domain, when in conjunction with a bound guide polynucleotide (e.g., gRNA), can specifically bind to a target polynucleotide sequence and thereby localize the base editor to the target nucleic acid sequence desired to be edited.

### Polynucleotide Programmable Nucleotide Binding Domain

[0253] Polynucleotide programmable nucleotide binding domains bind polynucleotides (e.g., RNA, DNA). A polynucleotide programmable nucleotide binding domain of a base editor can itself comprise one or more domains (e.g., one or more nuclease domains). In some embodiments, the nuclease domain of a polynucleotide programmable nucleotide binding domain comprises an endonuclease or an exonuclease.

[0254] Disclosed herein are base editors comprising a polynucleotide programmable nucleotide binding domain comprising all or a portion (e.g., a functional portion) of a CRISPR protein (i.e., a base editor comprising as a domain all or a portion (e.g., a functional portion) of a CRISPR protein (e.g., a Cas protein), also referred to as a “CRISPR protein-derived domain” of the base editor). A CRISPR protein-derived domain incorporated into a base editor can be modified compared to a wild-type or natural version of the CRISPR protein. A CRISPR protein-derived domain can comprise one or more mutations, insertions, deletions, rearrangements and/or recombinations relative to a wild-type or natural version of the CRISPR protein.

[0255] Cas proteins that can be used herein include class 1 and class 2. Non-limiting examples of Cas proteins include Cas1, Cas1B, Cas2, Cas3, Cas4, Cas5, Cas5d, Cas5t, Cas5h, Cas5a, Cas6, Cas7, Cas8, Cas9 (also known as Csn1 or Csx12), Cas10, Csy1, Csy2, Csy3, Csy4, Cse1, Cse2, Cse3, Cse4, Cse5e, Csc1, Csc2, Csa5, Csn1, Csn2, Csm1, Csm2, Csm3, Csm4, Csm5, Csm6, Cmr1, Cmr3, Cmr4, Cmr5, Cmr6, Csb1, Csb2, Csb3, Csx17, Csx14, Csx10, Csx16, CsaX, Csx3, Csx1, Csx1S, Csf1, Csf2, CsO, Csf4, Csd1, Csd2, Cst1, Cst2, Csh1, Csh2, Csa1, Csa2, Csa3, Csa4, Csa5, Cas12a/Cpf1, Cas12b/C2c1 (e.g., SEQ ID NO: 232), Cas12c/C2c3, Cas12d/CasY, Cas12e/CasX, Cas12g, Cas12h, Cas12i, and Cas12j/CasΦ, CARF, DinG, homologues thereof, or modified versions thereof. A CRISPR enzyme can direct cleavage of one or both strands at a target sequence, such as within a target sequence and/or within a complement of a target sequence. For example, a CRISPR enzyme can direct cleavage of one or both strands within about 1, 2, 3, 4, 5, 6, 7, 8, 9, 10, 15, 20, 25, 50, 100, 200, 500, or more base pairs from the first or last nucleotide of a target sequence.

[0256] A vector that encodes a CRISPR enzyme that is mutated to with respect to a corresponding wild-type enzyme such that the mutated CRISPR enzyme lacks the ability to cleave one or both strands of a target polynucleotide containing a target sequence can be used. A Cas protein (e.g., Cas9, Cas12) or a Cas domain (e.g., Cas9, Cas12) can refer to a polypeptide or domain with at least or at least about 50%, 60%, 70%, 80%, 90%, 91%, 92%, 93%, 94%, 95%, 96%, 97%, 98%, 99%, or 100% sequence identity and/or sequence homology to a wild-type exemplary Cas polypeptide or Cas domain. Cas (e.g., Cas9, Cas12) can refer to the wild-type or a modified form of the Cas protein that can comprise an amino acid change such as a deletion, insertion, substitution, variant, mutation, fusion, chimera, or any combination thereof.

[0257] In some embodiments, a CRISPR protein-derived domain of a base editor can include all or a portion (e.g., a functional portion) of Cas9 from Corynebacterium ulcerans (NCBI Refs: NC_015683.1, NC_017317.1); Corynebacterium diphtheria (NCBI Refs: NC_016782.1, NC_016786.1); Spiroplasma syrphidicola (NCBI Ref: NC_021284.1); Prevotella intermedia (NCBI Ref: NC_017861.1); Spiroplasma taiwanense (NCBI Ref: NC_021846.1); Streptococcus iniae (NCBI Ref: NC_021314.1); Belliella baltica (NCBI Ref: NC_018010.1); Psychroflexus torquis (NCBI Ref: NC_018721.1); Streptococcus thermophilus (NCBI Ref: YP_820832.1); Listeria innocua (NCBI Ref: NP_472073.1); Campylobacter jejuni (NCBI Ref: YP_002344900.1); Neisseria meningitidis (NCBI Ref: YP_002342100.1), Streptococcus pyogenes, or Staphylococcus aureus.

[0258] Some aspects of the disclosure provide high fidelity Cas9 domains. High fidelity Cas9 domains are known in the art and described, for example, in Kleinstiver, B. P., et al. “High-fidelity CRISPR-Cas9 nucleases with no detectable genome-wide off-target effects.” Nature 529, 490-495 (2016); and Slaymaker, I. M., et al. “Rationally engineered Cas9 nucleases with improved specificity.” Science 351, 84-88 (2015); the entire contents of each of which are incorporated herein by reference. An Exemplary high fidelity Cas9 domain is provided in the Sequence Listing as SEQ ID NO: 233.

[0259] In some embodiments, any of the Cas9 fusion proteins or complexes provided herein comprise one or more of a D10A, N497X, a R661X, a Q695X, and/or a Q926X mutation, or a corresponding mutation in any of the amino acid sequences provided herein, wherein X is any amino acid.

[0260] Typically, Cas9 proteins, such as Cas9 from S. pyogenes (spCas9), require a “protospacer adjacent motif (PAM)” or PAM-like motif, which is a 2-6 base pair DNA sequence immediately following the DNA sequence targeted by the Cas9 nuclease in the CRISPR bacterial adaptive immune system. The presence of an NGG PAM sequence is required to bind a particular nucleic acid region, where the “N” in “NGG” is adenosine (A), thymidine (T), or cytosine (C), and the G is guanosine. In some embodiments, any of the fusion proteins or complexes provided herein may contain a Cas9 domain that is capable of binding a nucleotide sequence that does not contain a canonical (e.g., NGG) PAM sequence. Cas9 domains that bind to non-canonical PAM sequences have been described in the art and would be apparent to the skilled artisan. For example, Cas9 domains that bind non-canonical PAM sequences have been described in Kleinstiver, B. P., et al., “Engineered CRISPR-Cas9 nucleases with altered PAM specificities” Nature 523, 481-485 (2015); and Kleinstiver, B. P., et al., “Broadening the targeting range of Staphylococcus aureus CRISPR-Cas9 by modifying PAM recognition” Nature Biotechnology 33, 1293-1298 (2015); the entire contents of each are hereby incorporated by reference.

[0261] In some embodiments, the napDNAbp is a circular permutant (e.g., SEQ ID NO: 238).

[0262] In some embodiments, the polynucleotide programmable nucleotide binding domain comprises a nickase domain. Herein the term “nickase” refers to a polynucleotide programmable nucleotide binding domain comprising a nuclease domain that is capable of cleaving only one strand of the two strands in a duplexed nucleic acid molecule (e.g., DNA). For example, where a polynucleotide programmable nucleotide binding domain comprises a nickase domain derived from Cas9, the Cas9-derived nickase domain can include a D10A mutation and a histidine at position 840. In another example, a Cas9-derived nickase domain comprises an H840A mutation, while the amino acid residue at position 10 remains a D.

[0263] In some embodiments, a Cas9 nuclease has an inactive (e.g., an inactivated) DNA cleavage domain, that is, the Cas9 is a nickase, referred to as an “nCas9” protein (for “nickase” Cas9; SEQ ID NO: 201). The Cas9 nickase may be a Cas9 protein that is capable of cleaving only one strand of a duplexed nucleic acid molecule (e.g., a duplexed DNA molecule). In some embodiments the Cas9 nickase comprises an amino acid sequence that is at least 60%, at least 65%, at least 70%, at least 75%, at least 80%, at least 85%, at least 90%, at least 95%, at least 96%, at least 97%, at least 98%, at least 99%, or at least 99.5% identical to any one of the Cas9 nickases provided herein. Additional suitable Cas9 nickases will be apparent to those of skill in the art based on this disclosure and knowledge in the field and are within the scope of this disclosure.

[0264] Also provided herein are base editors comprising a polynucleotide programmable nucleotide binding domain which is catalytically dead (i.e., incapable of cleaving a target polynucleotide sequence). For example, in the case of a base editor comprising a Cas9 domain, the Cas9 can comprise both a D10A mutation and an H840A mutation. In further embodiments, a catalytically dead polynucleotide programmable nucleotide binding domain comprises a point mutation (e.g., D10A or H840A) as well as a deletion of all or a portion (e.g., a functional portion) of a nuclease domain. dCas9 domains are known in the art and described, for example, in Qi et al., “Repurposing CRISPR as an RNA-guided platform for sequence-specific control of gene expression.” Cell. 2013; 152(5):1173-83, the entire contents of which are incorporated herein by reference.

[0265] The term “protospacer adjacent motif (PAM)” or PAM-like motif refers to a 2-6 base pair DNA sequence immediately following the DNA sequence targeted by a nucleic acid programmable DNA binding protein. In some embodiments, the PAM can be a 5′ PAM (i.e., located upstream of the 5′ end of the protospacer). In other embodiments, the PAM can be a 3′ PAM (i.e., located downstream of the 5′ end of the protospacer). The PAM sequence can be any PAM sequence known in the art. Suitable PAM sequences include, but are not limited to, NGG, NGA, NGC, NGN, NGT, NGTT, NGCG, NGAG, NGAN, NGNG, NGCN, NGCG, NGTN, NNGRRT, NNNRRT, NNGRR(N), TTTV, TYCV, TYCV, TATV, NNNNGATT, NNAGAAW, or NAAAAC. Y is a pyrimidine; N is any nucleotide base; W is A or T.

[0266] A base editor provided herein can comprise a CRISPR protein-derived domain that is capable of binding a nucleotide sequence that contains a canonical or non-canonical protospacer adjacent motif (PAM) sequence.

[0267] In some embodiments, the PAM is an “NRN” PAM where the “N” in “NRN” is adenine (A), thymine (T), guanine (G), or cytosine (C), and the R is adenine (A) or guanine (G); or the PAM is an “NYN” PAM, wherein the “N” in NYN is adenine (A), thymine (T), guanine (G), or cytosine (C), and the Y is cytidine (C) or thymine (T), for example, as described in R. T. Walton et al., 2020, Science, 10.1126/science.aba8853 (2020), the entire contents of which are incorporated herein by reference.

[0268] Several PAM variants are described in Table 3 below.

TABLE 3
Cas9 proteins and corresponding PAM sequences.
N is A, C, T, or G; and V is A, C, or G.

| Variant | PAM |
|---|---|
| spCas9 | NGG |
| spCas9-VRQR | NGA |
| spCas9-VRER | NGCG |
| xCas9 (sp) | NGN |
| saCas9 | NNGRRT |
| saCas9-KKH | NNNRRT |
| spCas9-MQKSER | NGCG |
| spCas9-MQKSER | NGCN |
| spCas9-LRKIQK | NGTN |
| spCas9-LRVSQK | NGTN |
| spCas9-LRVSQL | NGTN |
| spCas9-MQKFRAER | NGC |
| Cpf1 | 5′ (TTTV) |
| SpyMac | 5′-NAA-3′ |

[0269] In some embodiments, a CRISPR protein-derived domain of a base editor comprises all or a portion (e.g., a functional portion) of a Cas9 protein with a canonical PAM sequence (NGG). In other embodiments, a Cas9-derived domain of a base editor can employ a non-canonical PAM sequence. Such sequences have been described in the art and would be apparent to the skilled artisan. For example, Cas9 domains that bind non-canonical PAM sequences have been described in Kleinstiver, B. P., et al., “Engineered CRISPR-Cas9 nucleases with altered PAM specificities” Nature 523, 481-485 (2015); and Kleinstiver, B. P., et al., “Broadening the targeting range of Staphylococcus aureus CRISPR-Cas9 by modifying PAM recognition” Nature Biotechnology 33, 1293-1298 (2015); R. T. Walton et al. “Unconstrained genome targeting with near-PAMless engineered CRISPR-Cas9 variants” Science 10.1126/science.aba8853 (2020); Hu et al. “Evolved Cas9 variants with broad PAM compatibility and high DNA specificity,” Nature, 2018 Apr. 5, 556(7699), 57-63; Miller et al., “Continuous evolution of SpCas9 variants compatible with non-G PAMs” Nat. Biotechnol., 2020 April; 38(4):471-481; the entire contents of each are hereby incorporated by reference.

Fusion Proteins or Complexes Comprising a NapDNAbp and a Cytidine Deaminase and/or Adenosine Deaminase

[0270] Some aspects of the disclosure provide fusion proteins or complexes comprising a Cas9 domain or other nucleic acid programmable DNA binding protein (e.g., Cas12) and one or more cytidine deaminase, adenosine deaminase, or cytidine adenosine deaminase domains. It should be appreciated that the Cas9 domain may be any of the Cas9 domains or Cas9 proteins (e.g., dCas9 or nCas9) provided herein. In some embodiments, any of the Cas9 domains or Cas9 proteins (e.g., dCas9 or nCas9) provided herein may be fused with any of the cytidine deaminases and/or adenosine deaminases provided herein. The domains of the base editors disclosed herein can be arranged in any order.

[0271] In some embodiments, the fusion proteins or complexes comprising a cytidine deaminase or adenosine deaminase and a napDNAbp (e.g., Cas9 or Cas12 domain) do not include a linker sequence. In some embodiments, a linker is present between the cytidine or adenosine deaminase and the napDNAbp. In some embodiments, cytidine or adenosine deaminase and the napDNAbp are fused via any of the linkers provided herein. For example, in some embodiments the cytidine or adenosine deaminase and the napDNAbp are fused via any of the linkers provided herein.

[0272] It should be appreciated that the fusion proteins or complexes of the present disclosure may comprise one or more additional features. For example, in some embodiments, the fusion protein or complex may comprise inhibitors, cytoplasmic localization sequences, export sequences, such as nuclear export sequences, or other localization sequences, as well as sequence tags that are useful for solubilization, purification, or detection of the fusion proteins or complexes. Suitable protein tags provided herein include, but are not limited to, biotin carboxylase carrier protein (BCCP) tags, myc-tags, calmodulin-tags, FLAG-tags, hemagglutinin (HA)-tags, polyhistidine tags, also referred to as histidine tags or His-tags, maltose binding protein (MBP)-tags, nus-tags, glutathione-S-transferase (GST)-tags, green fluorescent protein (GFP)-tags, thioredoxin-tags, S-tags, Softags (e.g., Softag 1, Softag 3), strep-tags, biotin ligase tags, FlAsH tags, V5 tags, and SBP-tags. Additional suitable sequences will be apparent to those of skill in the art. In some embodiments, the fusion protein or complex comprises one or more His tags.

[0273] Exemplary, yet nonlimiting, fusion proteins are described in International PCT Application Nos. PCT/US2017/045381, PCT/US2019/044935, and PCT/US2020/016288, each of which is incorporated herein by reference for its entirety.

Fusion Proteins or Complexes with Internal Insertions

[0274] Provided herein are fusion proteins or complexes comprising a heterologous polypeptide fused to a nucleic acid programmable nucleic acid binding protein, for example, a napDNAbp. The heterologous polypeptide can be fused to the napDNAbp at a C-terminal end of the napDNAbp, an N-terminal end of the napDNAbp, or inserted at an internal location of the napDNAbp. In some embodiments, the heterologous polypeptide is a deaminase (e.g., cytidine or adenosine deaminase) or a functional fragment thereof. For example, a fusion protein can comprise a deaminase flanked by an N-terminal fragment and a C-terminal fragment of a Cas9 or Cas12 (e.g., Cas12b/C2c1), polypeptide.

[0275] The deaminase can be a circular permutant deaminase. In some embodiments, the deaminase is a circular permutant TadA, circularly permutated at amino acid residue 116, 136, or 65 as numbered in a TadA reference sequence.

[0276] The fusion protein or complexes can comprise more than one deaminase. The fusion protein or complex can comprise, for example, 1, 2, 3, 4, 5 or more deaminases. The deaminases in a fusion protein or complex can be adenosine deaminases, cytidine deaminases, or a combination thereof.

[0277] In some embodiments, the napDNAbp in the fusion protein or complex contains a Cas9 polypeptide or a fragment thereof. The Cas9 polypeptide can be a variant Cas9 polypeptide. The Cas9 polypeptide can be a circularly permuted Cas9 protein.

[0278] The heterologous polypeptide (e.g., deaminase) can be inserted in the napDNAbp (e.g., Cas9 or Cas12 (e.g., Cas12b/C2c1)) at a suitable location, for example, such that the napDNAbp retains its ability to bind the target polynucleotide and a guide nucleic acid. A deaminase (e.g., adenosine deaminase, cytidine deaminase) can be inserted into a napDNAbp without compromising function of the deaminase (e.g., base editing activity) or the napDNAbp (e.g., ability to bind to target nucleic acid and guide nucleic acid).

[0279] In some embodiments, the deaminase (e.g., adenosine deaminase, cytidine deaminase, or adenosine deaminase and cytidine deaminase) is inserted in regions of the Cas9 polypeptide comprising higher than average B-factors (e.g., higher B factors compared to the total protein or the protein domain comprising the disordered region). Cas9 polypeptide positions comprising a higher than average B-factor can include, for example, residues 768, 792, 1052, 1015, 1022, 1026, 1029, 1067, 1040, 1054, 1068, 1246, 1247, and 1248 as numbered in the above Cas9 reference sequence. Cas9 polypeptide regions comprising a higher than average B-factor can include, for example, residues 792-872, 792-906, and 2-791 as numbered in the above Cas9 reference sequence.

[0280] In some embodiments, a heterologous polypeptide (e.g., deaminase) is inserted in a flexible loop of a Cas9 polypeptide. The flexible loop portions can be selected from the group consisting of 530-537, 569-570, 686-691, 943-947, 1002-1025, 1052-1077, 1232-1247, or 1298-1300 as numbered in the above Cas9 reference sequence, or a corresponding amino acid residue in another Cas9 polypeptide. The flexible loop portions can be selected from the group consisting of: 1-529, 538-568, 580-685, 692-942, 948-1001, 1026-1051, 1078-1231, or 1248-1297 as numbered in the above Cas9 reference sequence, or a corresponding amino acid residue in another Cas9 polypeptide.

[0281] A heterologous polypeptide (e.g., adenine deaminase) can be inserted into a Cas9 polypeptide region corresponding to amino acid residues: 1017-1069, 1242-1247, 1052-1056, 1060-1077, 1002-1003, 943-947, 530-537, 568-579, 686-691, 1242-1247, 1298-1300, 1066-1077, 1052-1056, or 1060-1077 as numbered in the above Cas9 reference sequence, or a corresponding amino acid residue in another Cas9 polypeptide.

[0282] A heterologous polypeptide (e.g., adenine deaminase) can be inserted in place of a deleted region of a Cas9 polypeptide. The deleted region can correspond to an N-terminal or C-terminal portion of the Cas9 polypeptide. Exemplary internal fusions base editors are provided in Table 4A below:

TABLE 4
Insertion loci in Cas9 proteins

| BE ID | Modification | Other ID |
|---|---|---|
| IBE001 | Cas9 TadA ins 1015 | ISLAY01 |
| IBE002 | Cas9 TadA ins 1022 | ISLAY02 |
| IBE003 | Cas9 TadA ins 1029 | ISLAY03 |
| IBE004 | Cas9 TadA ins 1040 | ISLAY04 |
| IBE005 | Cas9 TadA ins 1068 | ISLAY05 |
| IBE006 | Cas9 TadA ins 1247 | ISLAY06 |
| IBE007 | Cas9 TadA ins 1054 | ISLAY07 |
| IBE008 | Cas9 TadA ins 1026 | ISLAY08 |
| IBE009 | Cas9 TadA ins 768 | ISLAY09 |
| IBE020 | delta HNH TadA 792 | ISLAY20 |
| IBE021 | N-term fusion single TadA helix truncated 165-end | ISLAY21 |
| IBE029 | TadA-Circular Permutant116 ins1067 | ISLAY29 |
| IBE031 | TadA- Circular Permutant 136 ins1248 | ISLAY31 |
| IBE032 | TadA- Circular Permutant 136ins 1052 | ISLAY32 |
| IBE035 | delta 792-872 TadA ins | ISLAY35 |
| IBE036 | delta 792-906 TadA ins | ISLAY36 |
| IBE043 | TadA-Circular Permutant 65 ins1246 | ISLAY43 |
| IBE044 | TadA ins C-term truncate2 791 | ISLAY44 |

[0283] A heterologous polypeptide (e.g., deaminase) can be inserted within a structural or functional domain of a Cas9 polypeptide. A heterologous polypeptide (e.g., deaminase) can be inserted between two structural or functional domains of a Cas9 polypeptide. A heterologous polypeptide (e.g., deaminase) can be inserted in place of a structural or functional domain of a Cas9 polypeptide, for example, after deleting the domain from the Cas9 polypeptide. The structural or functional domains of a Cas9 polypeptide can include, for example, RuvC I, RuvC II, RuvC III, Rec1, Rec2, PI, or HNH.

[0284] A fusion protein can comprise a linker between the deaminase and the napDNAbp polypeptide. The linker can be a peptide or a non-peptide linker. For example, the linker can be an XTEN, (GGGS)n (SEQ ID NO: 246), (GGGGS)n (SEQ ID NO: 247), (G)n, (EAAAK)n (SEQ ID NO: 248), (GGS)n, SGSETPGTSESATPES (SEQ ID NO: 249). In other embodiments, the amino acid sequence of the linker is GGSGGS (SEQ ID NO: 250) or GSSGSETPGTSESATPESSG (SEQ ID NO: 251). In other embodiments, the linker is a rigid linker. In other embodiments of the above aspects, the linker is encoded by GGAGGCTCTGGAGGAAGC (SEQ ID NO: 252) or GGCTCTTCTGGATCTGAAACACCTGGCACAAGCGAGAGCGCCACCCCTGAGAGCTCTGGC (SEQ ID NO: 253). In some embodiments, the fusion protein comprises a linker between the N-terminal Cas9 fragment and the deaminase. In some embodiments, the fusion protein comprises a linker between the C-terminal Cas9 fragment and the deaminase. In some embodiments, the N-terminal and C-terminal fragments of napDNAbp are connected to the deaminase with a linker. In some embodiments, the N-terminal and C-terminal fragments are joined to the deaminase domain without a linker. In some embodiments, the fusion protein comprises a linker between the N-terminal Cas9 fragment and the deaminase but does not comprise a linker between the C-terminal Cas9 fragment and the deaminase. In some embodiments, the fusion protein comprises a linker between the C-terminal Cas9 fragment and the deaminase but does not comprise a linker between the N-terminal Cas9 fragment and the deaminase.

[0285] In other embodiments, the fusion protein or complex contains a nuclear localization signal (e.g., a bipartite nuclear localization signal). In other embodiments, the amino acid sequence of the nuclear localization signal is MAPKKKRKVGIHGVPAA (SEQ ID NO: 261). In other embodiments of the above aspects, the nuclear localization signal is encoded by the following sequence: ATGCCCCAAAGAAGAAGCGGAAGGTCGGTATCCACGGAGTCCCAGCAGCC (SEQ ID NO: 262). In some embodiments, the base editing system described herein is an ABE with TadA inserted into a Cas9. Polypeptide sequences of relevant ABEs with TadA inserted into a Cas9 are provided in the attached Sequence Listing as SEQ ID NOs: 263-308.

[0286] Exemplary, yet nonlimiting, fusion proteins are described in International PCT Application Nos. PCT/US2020/016285 and U.S. Provisional Application Nos. 62/852,228 and 62/852,224, the contents of which are incorporated by reference herein in their entireties.

### A to G Editing

[0287] In some embodiments, a base editor described herein comprises an adenosine deaminase domain. Such an adenosine deaminase domain of a base editor can facilitate the editing of an adenine (A) nucleobase to a guanine (G) nucleobase by deaminating the A to form inosine (I), which exhibits base pairing properties of G. In some embodiments, an A-to-G base editor further comprises an inhibitor of inosine base excision repair, for example, a uracil glycosylase inhibitor (UGI) domain or a catalytically inactive inosine specific nuclease. Without wishing to be bound by any particular theory, the UGI domain or catalytically inactive inosine specific nuclease can inhibit or prevent base excision repair of a deaminated adenosine residue (e.g., inosine), which can improve the activity or efficiency of the base editor.

[0288] A base editor comprising an adenosine deaminase can act on any polynucleotide, including DNA, RNA and DNA-RNA hybrids. In an embodiment an adenosine deaminase domain of a base editor comprises all or a portion (e.g., a functional portion) of an ADAT comprising one or more mutations which permit the ADAT to deaminate a target A in DNA. For example, the base editor can comprise all or a portion (e.g., a functional portion) of an ADAT from Escherichia coli (EcTadA) comprising one or more of the following mutations: D108N, A106V, D147Y, E155V, L84F, H123Y, I156F, or a corresponding mutation in another adenosine deaminase. Exemplary ADAT homolog polypeptide sequences are provided in the Sequence Listing as SEQ ID NOs: 1 and 309-315.

[0289] The adenosine deaminase can be derived from any suitable organism (e.g., E. coli). In some embodiments, the adenosine deaminase is from Escherichia coli, Staphylococcus aureus, Salmonella typhi, Shewanella putrefaciens, Haemophilus influenzae, Caulobacter crescentus, or Bacillus subtilis. In some embodiments, the adenine deaminase is a naturally-occurring adenosine deaminase that includes one or more mutations corresponding to any of the mutations provided herein (e.g., mutations in ecTadA). The corresponding residue in any homologous protein can be identified by e.g., sequence alignment and determination of homologous residues. The mutations in any naturally-occurring adenosine deaminase (e.g., having homology to ecTadA) that correspond to any of the mutations described herein (e.g., any of the mutations identified in ecTadA) can be generated accordingly.

[0290] In some embodiments, the adenosine deaminase comprises an amino acid sequence that is at least 60%, at least 65%, at least 70%, at least 75%, at least 80%, at least 85%, at least 90%, at least 95%, at least 96%, at least 97%, at least 98%, at least 99%, or at least 99.5% identical to any one of the amino acid sequences set forth in any of the adenosine deaminases provided herein. It should be appreciated that adenosine deaminases provided herein may include one or more mutations (e.g., any of the mutations provided herein). The disclosure provides any deaminase domains with a certain percent identify plus any of the mutations or combinations thereof described herein. In some embodiments, the adenosine deaminase comprises an amino acid sequence that has 1, 2, 3, 4, 5, 6, 7, 8, 9, 10, 11, 12, 13, 14, 15, 16, 17, 18, 19, 20, 21, 22, 21, 24, 25, 26, 27, 28, 29, 30, 31, 32, 33, 34, 35, 36, 37, 38, 39, 40, 41, 42, 43, 44, 45, 46, 47, 48, 49, 50, or more mutations compared to a reference sequence, or any of the adenosine deaminases provided herein.

[0291] It should be appreciated that any of the mutations provided herein (e.g., based on a TadA reference sequence, such as TadA*7.10 (SEQ ID NO: 1)) can be introduced into other adenosine deaminases, such as E. coli TadA (ecTadA), S. aureus TadA (saTadA), or other adenosine deaminases (e.g., bacterial adenosine deaminases). In some embodiments, the TadA reference sequence is TadA*7.10 (SEQ ID NO: 1). It would be apparent to the skilled artisan that additional deaminases may similarly be aligned to identify homologous amino acid residues that can be mutated as provided herein. Thus, any of the mutations identified in a TadA reference sequence can be made in other adenosine deaminases (e.g., ecTada) that have homologous amino acid residues. It should also be appreciated that any of the mutations provided herein can be made individually or in any combination in a TadA reference sequence or another adenosine deaminase.

[0292] In some embodiments, the adenosine deaminase comprises an alteration or set of alterations selected from those listed in Tables 5A-5E below:

TABLE 5A
Adenosine Deaminase Variants. Residue positions in the E. coli TadA variant (TadA*) are indicated.

| | 23 | 26 | 36 | 37 | 48 | 49 | 51 | 72 | 84 | 87 | 106 | 108 | 123 | 125 | 142 | 146 | 147 | 152 | 155 | 156 | 157 | 161 |
|---|---|---|---|---|---|---|---|---|---|---|---|---|---|---|---|---|---|---|---|---|---|---|
| TadA*0.1 | W | R | H | N | P | | R | N | L | S | A | D | H | G | A | S | D | R | E | I | K | K |
| TadA*0.2 | W | R | H | N | P | | R | N | L | S | A | D | H | G | A | S | D | R | E | I | K | K |
| TadA*1.1 | W | R | H | N | P | | R | N | L | S | A | N | H | G | A | S | D | R | E | I | K | K |
| TadA*1.2 | W | R | H | N | P | | R | N | L | S | V | N | H | G | A | S | D | R | E | I | K | K |
| TadA*2.1 | W | R | H | N | P | | R | N | L | S | V | N | H | G | A | S | Y | R | V | I | K | K |
| TadA*2.2 | W | R | H | N | P | | R | N | L | S | V | N | H | G | A | S | Y | R | V | I | K | K |
| TadA*2.3 | W | R | H | N | P | | R | N | L | S | V | N | H | G | A | S | Y | R | V | I | K | K |
| TadA*2.4 | W | R | H | N | P | | R | N | L | S | V | N | H | G | A | S | Y | R | V | I | K | K |
| TadA*2.5 | W | R | H | N | P | | R | N | L | S | V | N | H | G | A | S | Y | R | V | I | K | K |
| TadA*2.6 | W | R | H | N | P | | R | N | L | S | V | N | H | G | A | S | Y | R | V | I | K | K |
| TadA*2.7 | W | R | H | N | P | | R | N | L | S | V | N | H | G | A | S | Y | R | V | I | K | K |
| TadA*2.8 | W | R | H | N | P | | R | N | L | S | V | N | H | G | A | S | Y | R | V | I | K | K |
| TadA*2.9 | W | R | H | N | P | | R | N | L | S | V | N | H | G | A | S | Y | R | V | I | K | K |
| TadA*2.10 | W | R | H | N | P | | R | N | L | S | V | N | H | G | A | S | Y | R | V | I | K | K |
| TadA*2.11 | W | R | H | N | P | | R | N | L | S | V | N | H | G | A | S | Y | R | V | I | K | K |
| TadA*2.12 | W | R | H | N | P | | R | N | L | S | V | N | H | G | A | S | Y | R | V | I | K | K |
| TadA*3.1 | W | R | H | N | P | | R | N | F | S | V | N | Y | G | A | S | Y | R | V | F | K | K |
| TadA*3.2 | W | R | H | N | P | | R | N | F | S | V | N | Y | G | A | S | Y | R | V | F | K | K |
| TadA*3.3 | W | R | H | N | P | | R | N | F | S | V | N | Y | G | A | S | Y | R | V | F | K | K |
| TadA*3.4 | W | R | H | N | P | | R | N | F | S | V | N | Y | G | A | S | Y | R | V | F | K | K |
| TadA*3.5 | W | R | \|H | N | P | | R | N | F | S | V | N | Y | G | A | S | Y | R | V | F | K | K |
| TadA*3.6 | W | R | H | N | P | | R | N | F | S | V | N | Y | G | A | S | Y | R | V | F | K | K |
| TadA*3.7 | W | R | H | N | P | | R | N | F | S | V | N | Y | G | A | S | Y | R | V | F | K | K |
| TadA*3.8 | W | R | H | N | P | | R | N | F | S | V | N | Y | G | A | S | Y | R | V | F | K | K |
| TadA*4.1 | W | R | H | N | P | | R | N | L | S | V | N | H | G | N | S | Y | R | V | I | K | K |
| TadA*4.2 | W | G | H | N | P | | R | N | L | S | V | N | H | G | N | S | Y | R | V | I | K | K |
| TadA*4.3 | W | R | H | N | P | | R | N | F | S | V | N | Y | G | N | S | Y | R | V | F | K | K |
| TadA*5.1 | W | R | L | N | P | | L | N | F | S | V | N | Y | G | A | C | Y | R | V | F | N | K |
| TadA*5.2 | W | R | H | S | P | | R | N | F | S | V | N | Y | G | A | S | Y | R | V | F | K | T |
| TadA*5.3 | W | R | L | N | P | | L | N | I | S | V | N | Y | G | A | C | Y | R | V | F | N | K |
| TadA*5.4 | W | R | H | S | P | | R | N | F | S | V | N | Y | G | A | S | Y | R | V | F | K | T |
| TadA*5.5 | W | R | L | N | P | | L | N | F | S | V | N | Y | G | A | C | Y | R | V | F | N | K |
| TadA*5.6 | W | R | L | N | P | | L | N | F | S | V | N | Y | G | A | C | Y | R | V | F | N | K |
| TadA*5.7 | W | R | L | N | P | | L | N | F | S | V | N | Y | G | A | C | Y | R | V | F | N | K |
| TadA*5.8 | W | R | L | N | P | | L | N | F | S | V | N | Y | G | A | C | Y | R | V | F | N | K |
| TadA*5.9 | W | R | L | N | P | | L | N | F | S | V | N | Y | G | A | C | Y | R | V | F | N | K |
| TadA*5.10 | W | R | L | N | P | | L | N | F | S | V | N | Y | G | A | C | Y | R | V | F | N | K |
| TadA*5.11 | W | R | L | N | P | | L | N | F | S | V | N | Y | G | A | C | Y | R | V | F | N | K |
| TadA*5.12 | W | R | L | N | P | | L | N | F | S | V | N | Y | G | A | C | Y | R | V | F | N | K |
| TadA*5.13 | W | R | H | N | P | | L | D | F | S | V | N | Y | A | A | S | Y | R | V | F | K | K |
| TadA*5.14 | W | R | H | N | S | | L | N | F | C | V | N | Y | G | A | S | Y | R | V | F | K | K |
| TadA*6.1 | W | R | H | N | S | | L | N | F | S | V | N | Y | G | N | S | Y | R | V | F | K | K |
| TadA*6.2 | W | R | H | N | T | V | L | N | F | S | V | N | Y | G | N | S | Y | R | V | F | N | K |
| TadA*6.3 | W | R | L | N | S | | L | N | F | S | V | N | Y | G | A | C | Y | R | V | F | N | K |
| TadA*6.4 | W | R | L | N | S | | L | N | F | S | V | N | Y | G | N | C | Y | R | V | F | N | K |
| TadA*6.5 | W | R | L | N | T | V | L | N | F | S | V | N | Y | G | A | C | Y | R | V | F | N | K |
| TadA*6.6 | W | R | L | N | T | V | L | N | F | S | V | N | Y | G | N | C | Y | R | V | F | N | K |
| TadA*7.1 | W | R | L | N | A | | L | N | F | S | V | N | Y | G | A | C | Y | R | V | F | N | K |
| TadA*7.2 | W | R | L | N | A | | L | N | F | S | V | N | Y | G | N | C | Y | R | V | F | N | K |
| TadA*7.3 | L | R | L | N | A | | L | N | F | S | V | N | Y | G | A | C | Y | R | V | F | N | K |
| TadA*7.4 | R | R | L | N | A | | L | N | F | S | V | N | Y | G | A | C | Y | R | V | F | N | K |
| TadA*7.5 | W | R | L | N | A | | L | N | F | S | V | N | Y | G | A | C | Y | H | V | F | N | K |
| TadA*7.6 | W | R | L | N | A | | L | N | I | S | V | N | Y | G | A | C | Y | P | V | F | N | K |
| TadA*7.7 | L | R | L | N | A | | L | N | F | S | V | N | Y | G | A | C | Y | P | V | F | N | K |
| TadA*7.8 | L | R | L | N | A | | L | N | F | S | V | N | Y | G | N | C | Y | R | V | F | N | K |
| TadA*7.9 | L | R | L | N | A | | L | N | F | S | V | N | Y | G | N | C | Y | P | V | F | N | K |
| TadA*7.10 | R | R | L | N | A | | L | N | F | S | V | N | Y | G | A | C | Y | P | V | F | N | K |

TABLE 5B
Adenosine Deaminase Variants. Residue positions in the E. coli TadA variant
(TadA*) are indicated. Alterations are referenced to TadA*7.10 (first row).

| | 23 | 36 | 48 | 51 | 76 | 82 | 84 | 106 | 108 | 123 | 146 | 147 | 152 | 154 | 155 | 156 | 157 | 166 |
|---|---|---|---|---|---|---|---|---|---|---|---|---|---|---|---|---|---|---|
| TadA*7.10 | R | L | A | L | I | V | F | V | N | Y | C | Y | P | Q | V | F | N | T |
| TadA*8.1 | | | | | | | | | | | | T | | | | | | |
| TadA*8.2 | | | | | | | | | | | | R | | | | | | |
| TadA*8.3 | | | | | | | | | | | | | | S | | | | |
| TadA*8.4 | | | | | | | | | | H | | | | | | | | |
| TadA*8.5 | | | | | | S | | | | | | | | | | | | |
| TadA*8.6 | | | | | | | | | | | | | | | | | | R |
| TadA*8.7 | | | | | | | | | | | | | | R | | | | |
| TadA*8.8 | | | | | | | | | | H | | R | | R | | | | |
| TadA*8.9 | | | | | Y | | | | | | | R | | R | | | | |
| TadA*8.10 | | | | | | | | | | | | R | | R | | | | R |
| TadA*8.11 | | | | | | | | | | | | T | | R | | | | |
| TadA*8.12 | | | | | | | | | | | | T | | S | | | | |
| TadA*8.13 | | | | | Y | | | | | H | | R | | R | | | | |
| TadA*8.14 | | | | | Y | S | | | | | | | | | | | | |
| TadA*8.15 | | | | | | S | | | | | | R | | | | | | |
| TadA*8.16 | | | | | | S | | | | H | | R | | | | | | |
| TadA*8.17 | | | | | | S | | | | | | | | R | | | | |
| TadA*8.18 | | | | | | S | | | | H | | | | R | | | | |
| TadA*8.19 | | | | | | S | | | | H | | R | | R | | | | |
| TadA*8.20 | | | | | Y | S | | | | H | | R | | R | | | | |
| TadA*8.21 | | | | | | | | | | | | R | | S | | | | |
| TadA*8.22 | | | | | | S | | | | | | | | S | | | | |
| TadA*8.23 | | | | | | S | | | | H | | | | | | | | |
| TadA*8.24 | | | | | | S | | | | H | | T | | | | | | |

TABLE 5C
Adenosine Deaminase Variants. Alterations are referenced
to TadA*7.10. Additional details of TadA*9 adenosine
deaminases are described in International PCT Application
No. PCT/US2020/049975, which is incorporated herein
by reference in its entirety for all purposes.

| TadA*9 | |
|---|---|
| Description | Alterations |
| TadA*9.1 | E25F, V82S, Y123H, T133K, Y147R, Q154R |
| TadA*9.2 | E25F, V82S, Y123H, Y147R, Q154R |
| TadA*9.3 | V82S, Y123H, P124W, Y147R, Q154R |
| TadA*9.4 | L51W, V82S, Y123H, C146R, Y147R, Q154R |
| TadA*9.5 | P54C, V82S, Y123H, Y147R, Q154R |
| TadA*9.6 | Y73S, V82S, Y123H, Y147R, Q154R |
| TadA*9.7 | N38G, V82T, Y123H, Y147R, Q154R |
| TadA*9.8 | R23H, V82S, Y123H, Y147R, Q154R |
| TadA*9.9 | R21N, V82S, Y123H, Y147R, Q154R |
| TadA*9.10 | V82S, Y123H, Y147R, Q154R, A158K |
| TadA*9.11 | N72K, V82S, Y123H, D139L, Y147R, Q154R, |
| TadA*9.12 | E25F, V82S, Y123H, D139M, Y147R, Q154R |
| TadA*9.13 | M70V, V82S, M94V, Y123H, Y147R, Q154R |
| TadA*9.14 | Q71M, V82S, Y123H, Y147R, Q154R |
| TadA*9.15 | E25F, V82S, Y123H, T133K, Y147R, Q154R |
| TadA*9.16 | E25F, V82S, Y123H, Y147R, Q154R |
| TadA*9.17 | V82S, Y123H, P124W, Y147R, Q154R |
| TadA*9.18 | L51W, V82S, Y123H, C146R, Y147R, Q154R |
| TadA*9.19 | P54C, V82S, Y123H, Y147R, Q154R |
| TadA*9.2 | Y73S, V82S, Y123H, Y147R, Q154R |
| TadA*9.21 | N38G, V82T, Y123H, Y147R, Q154R |
| TadA*9.22 | R23H, V82S, Y123H, Y147R, Q154R |
| TadA*9.23 | R21N, V82S, Y123H, Y147R, Q154R |
| TadA*9.24 | V82S, Y123H, Y147R, Q154R, A158K |
| TadA*9.25 | N72K, V82S, Y123H, D139L, Y147R, Q154R, |
| TadA*9.26 | E25F, V82S, Y123H, D139M, Y147R, Q154R |
| TadA*9.27 | M70V, V82S, M94V, Y123H, Y147R, Q154R |
| TadA*9.28 | Q71M, V82S, Y123H, Y147R, Q154R |
| TadA*9.29 | E25F_I76Y_V82S_Y123H_Y147R_Q154R |
| TadA*9.30 | I76Y_V82T_Y123H_Y147R_Q154R |
| TadA*9.31 | N38G_I76Y_V82S_Y123H_Y147R_Q154R |
| TadA*9.32 | N38G_I76Y_V82T_Y123H_Y147R_Q154R |
| TadA*9.33 | R23H_I76Y_V82S_Y123H_Y147R_Q154R |
| TadA*9.34 | P54C_I76Y_V82S_Y123H_Y147R_Q154R |
| TadA*9.35 | R21N_I76Y_V82S_Y123H_Y147R_Q154R |
| TadA*9.36 | I76Y_V82S_Y123H_D138M_Y147R_Q154R |
| TadA*9.37 | Y72S_I76Y_V82S_Y123H_Y147R_Q154R |
| TadA*9.38 | E25F_I76Y_V82S_Y123H_Y147R_Q154R |
| TadA*9.39 | I76Y_V82T_Y123H_Y147R_Q154R |
| TadA*9.40 | N38G_I76Y_V82S_Y123H_Y147R_Q154R |
| TadA*9.41 | N38G_I76Y_V82T_Y123H_Y147R_Q154R |
| TadA*9.42 | R23H_I76Y_V82S_Y123H_Y147R_Q154R |
| TadA*9.43 | P54C_I76Y_V82S_Y123H_Y147R_Q154R |
| TadA*9.44 | R21N_I76Y_V82S_Y123H_Y147R_Q154R |
| TadA*9.45 | I76Y_V82S_Y123H_D138M_Y147R_Q154R |
| TadA*9.46 | Y72S_I76Y_V82S_Y123H_Y147R_Q154R |
| TadA*9.47 | N72K V82S, Y123H, Y147R, Q154R |
| TadA*9.48 | Q71M_V82S, Y123H, Y147R, Q154R |
| TadA*9.49 | M70V, V82S, M94V, Y123H, Y147R, Q154R |
| TadA*9.50 | V82S, Y123H, T133K, Y147R, Q154R |
| TadA*9.51 | V82S, Y123H, T133K, Y147R, Q154R, A158K |
| TadA*9.52 | M70V, Q71M, N72K, V82S, Y123H, Y147R, Q154R |
| TadA*9.53 | N72K_V82S, Y123H, Y147R, Q154R |
| TadA*9.54 | Q71M_V82S, Y123H, Y147R, Q154R |
| TadA*9.55 | M70V, V82S, M94V, Y123H, Y147R, Q154R |
| TadA*9.56 | V82S, Y123H, T133K, Y147R, Q154R |
| TadA*9.57 | V82S, Y123H, T133K, Y147R, Q154R, A158K |
| TadA*9.58 | M70V, Q71M, N72K, V82S, Y123H, Y147R, Q154R |

[0293] In some embodiments, the adenosine deaminase comprises one or more of M1, S2A, S2E, W4D, W4E, V4M, F76S, H8E, H8Y, E9Y, M12S, R13H, R131, R13Y, T17L, T17S, L18A, L18E, A19N, R21N, K20K, K20R, R21A, G22P, W23D), R23H, W23G, W23Q, W23L, W23R, D24E, D24G, E25F7, E25M, E25D), E25A, E25G, E25R, E25V, E25S, E25Y, R26D), R26E, R26G, R26N, R26Q, R26C, R26L, R26K, R26W, E27V, E27D), P29V, V30G, L34S, L34V, L36H, H36L, H36N, N37N, N37T, N37S, N38G, N38R, W45A, W45L, W45N, N46N, R46W, R46F7, R46Q, R46M, R47A, R47Q, R47F7, R47K, R47P, R47W, R47M, P48T, P48L, P48A, P48I, P48S, I49G, I49H, I49V, I49F, I49H, G50L, R51H, R51L, R51N, L51W, R51Y, H52D, H52Y, D53P, P54C, P54T, A55H, T55A, A56E, A56S, E59A, E59G, E591, E59Q, E59W, M61A, M61I, M61L, M61V, L63S, L63V, Q65V, G66C, G67D), G67L, G67V, L68Q, M70H, M70Q, L84F7, M70V, M70L, E70A, M70V, Q71M, Q71N, Q71L, Q71R, N72A, N72K, N72S, N72D), N72Y, Y73G, Y73I, Y73K, Y73R, Y73S, R74A, R74Q, R74G, R74K, R74L, R74N, I761D, I76F, 1761, 176N, I76T, I76Y, D77G, A78I, T79M, L80M, L80Y, V82A, V82S, V82G, V82T, L84E, L84F, L84Y, E85K, E85G, E85P, E85S, S87C, S87L, S87V, V88A, V88M, C90S, A91A, A91G, A91S, A91V, A91T, G92T, A93I, M94A, M94V, M94L, M94I, M94H, I95S, I95G, I95L, I95H, I95V, H96A, H96L, H96R, H96S, S97C, S97G, S97I, S97M, S97R, S97S, R98K, R98I, R98N, R98Q, G100R, G100V, R101V, R101R, V102A, V102F, V102I, V102V, D103A, F104G, D104N, F104V, F104I, F104L, A106T, V106Q, V106F, V106W, V106M, A106A, A106Q, A106F, A106G, A106W, A106M, A106V, A106R, R107C, R107G, R107P, R107K, R107A, R107N, R107W, R107H, R107S, D108N, D108F, D108G, D108V, D108A, D108Y, D108H, D108I, D108K, D108L, D108M, D108Q, N108Q, N108F, N108W, N108M, N108K, D108K, D108F, D108M, D108Q, D108R, D108W, D108S, A109H, A109K, A109R, A109S, A109T, A109V, K110G, K110H, K110I, K110R, K110T, T111A, T111G, T111H, T111R, G112A, A114G, A114H, A114V, G115S, L117M, L117N, L117V, M118D, M118G, M118K, M118N, M118V, D119L, D119N, D119S, D119V, V120H, V120L, H122H, H122N, H122P, H122R, H122S, H122Y, H123C, H123G, H123P, H123V, H123Y, Y123H, P124G, P124I, P124L, P124W, G125H, G125I, G125A, G125M, G125K, M126D, M126H, M126K, M126I, M126N, M1260, M126S, M126Y, N127H, N127S, N127D, N127K, N127R, H128R, R129H, R129Q, R129V, R129I, R129E, R129V, I1321, I132F, T133V, T133E, T133G, T133K, E134A, E134E, E134G, E134I, G135G, G135V, I136G, I136L, I136T, I137A, I137D, I137E, L137M, I1375, A138D, A138E, A138G, S138A, A138N, A138S, A138T, A138V, A138Y, D139E, D139I, D139C, D139L, D139M, E140A, E140C, E140L, E140R, A142N, A142D, A142G, A142A, A142L, A142S, A142T, A142N, A142S, A142V, A143D, A143E, A143G, A143D, A143G, A143E, A143L, A143W, A143M, A143S, A143Q, A143R, C146R, S146A, S146C, S146D, S146F, S146R, S146T, D147D, D147L, D147F, D147G, D147Y, Y147T, Y147R, Y147D, D147R, F148L, F148F, F148R, F148Y, F149C, F149M, F149R, F149Y, M151F, M151P, M151R, M151V, R152C, R152F, R152H, R152P, R152R, R153C, R153Q, R153R, R153V, Q154E, Q154H, Q154M, Q154R, Q154L, Q154S, Q154V, E155F, E155G, E155I, E155K, E155P, E155V, E155D, I156A, I156F, I156D, I156K, I156N, I156R, I156Y, E157A, E157F, E157I, E157P, E157T, E157V, N157K, K157N, K157R, A158Q, A158K, A158V, Q159F, Q159K, Q159L, Q159N, K160A, K160S, K160E, K160K, K160N, K161I, K161A, K161N, K161Q, K161S, K161T, A162D, A162Q, R162H, R162P, A162S, Q163G, Q163H, Q163N, Q163R, S164I, S164R, S164Y, S165A, S165D, S165I, S165T, S165Y, T166D, T166K, T166I, T166N, T166P, T166R, D167S and/or D167N mutation in a TadA reference sequence (e.g., TadA*7.10, ecTadA, or TadA8e), and any alternative mutation at the corresponding position, or any substitution from R26, W23, E27, H36, R47, P48, R51, H52, R74, 176, V82, V88, M94, 195, H96, A106, D108, A109, K110, T111, A114, D119, H122, H123, M126, N127, A142, S146, D147, F149, R152, Q154, E155, 1156, E157, K161, T166, and/or D167, with respect to a TadA reference sequence, or a substitution of 2-50 amino acids in a TadA reference sequence, which may be selected from W23R, E27D, H36L, R47K, P48A, R51H, R51L, I76F, I76Y, V82S, A106V, D108G, A109S, K110R, T111H, A114V, D119N, H122R, H122N, H123Y, M126I, N127K, S146C, D147R, R152P, Q154R, E155V, 1156F, K157N, K161N, T166I, and D167N, or one or more corresponding mutations in another adenosine deaminase. Additional mutations are described in U.S. Patent Application Publication No. 2022/0307003 A1 and International Patent Application Publications No. WO 2023/288304 A2 and WO 2023/034959 A2, the disclosures of which are incorporated herein by reference in their entirety for all purposes.

[0294] In embodiments, a variant of TadA*7.10 comprises one or more alterations selected from any of those alterations provided herein.

[0295] In particular embodiments, an adenosine deaminase heterodimer comprises a TadA*8 domain and an adenosine deaminase domain selected from Staphylococcus aureus (S. aureus) TadA, Bacillus subtilis (B. subtilis) TadA, Salmonella typhimurium (S. typhimurium) TadA, Shewanella putrefaciens (S. putrefaciens) TadA, Haemophilus influenzae F3031 (H influenzae) TadA, Caulobacter crescentus (C. crescentus) TadA, Geobacter sulfurreducens (G. sulfurreducens) TadA, or TadA*7.10.

[0296] In some embodiments, the TadA*8 is a variant as shown in Table 5D. Table 5D shows certain amino acid position numbers in the TadA amino acid sequence and the amino acids present in those positions in the TadA-7.10 adenosine deaminase. Table 5D also shows amino acid changes in TadA variants relative to TadA-7.10 following phage-assisted non-continuous evolution (PANCE) and phage-assisted continuous evolution (PACE), as described in M. Richter et al., 2020, Nature Biotechnology, doi.org/10.1038/s41587-020-0453-z, the entire contents of which are incorporated by reference herein. In some embodiments, the TadA*8 is TadA*8a, TadA*8b, TadA*8c, TadA*8d, or TadA*8e. In some embodiments, the TadA*8 is TadA*8e. In one embodiment, an adenosine deaminase is a TadA*8 that comprises or consists essentially of SEQ ID NO: 316 or a fragment thereof having adenosine deaminase activity.

TABLE 5D
Select TadA*8 Variants

| | | TadA amino acid number | | | | | | | | | |
|---|---|---|---|---|---|---|---|---|---|---|---|
| | TadA | 26 | 88 | 109 | 111 | 119 | 122 | 147 | 149 | 166 | 167 |
| | TadA-7.10 | R | V | A | T | D | H | Y | F | T | D |
| PANCE 1 | | | | | R | | | | | | |
| PANCE 2 | | | | S/T | R | | | | | | |
| PACE | TadA-8a | C | | S | R | N | N | D | Y | I | N |
| | TadA-8b | | A | S | R | N | N | | Y | I | N |
| | TadA-8c | C | | S | R | N | N | | Y | I | N |
| | TadA-8d | | A | | R | N | | | Y | | |
| | TadA-8e | | | S | R | N | N | D | Y | I | N |

[0297] In some embodiments, the TadA variant is a variant as shown in Table 5E. Table 5E shows certain amino acid position numbers in the TadA amino acid sequence and the amino acids present in those positions in the TadA*7.10 adenosine deaminase. In some embodiments, the TadA variant is MSP605, MSP680, MSP823, MSP824, MSP825, MSP827, MSP828, or MSP829. In some embodiments, the TadA variant is MSP828. In some embodiments, the TadA variant is MSP829.

TABLE 5E
TadA Variants

| | TadA Amino Acid Number | | | | | | | |
|---|---|---|---|---|---|---|---|---|
| Variant | 36 | 76 | 82 | 147 | 149 | 154 | 157 | 167 |
| TadA-7.10 | L | I | V | Y | F | Q | N | D |
| MSP605 | | | G | T | | S | | |
| MSP680 | | Y | G | T | | S | | |
| MSP823 | H | | G | T | | S | K | |
| MSP824 | | | G | D | Y | S | | N |
| MSP825 | H | | G | D | Y | S | K | N |
| MSP827 | H | Y | G | T | | S | K | |
| MSP828 | | Y | G | D | Y | S | | N |
| MSP829 | H | Y | G | D | Y | S | K | N |

[0298] In particular embodiments, the fusion proteins or complexes comprise a single (e.g., provided as a monomer) TadA* (e.g., TadA*8 or TadA*9). Throughout the present disclosure, an adenosine deaminase base editor that comprises a single TadA* domain is indicates using the terminology ABEm or ABE #m, where “#” is an identifying number (e.g., ABE8.20m), where “m” indicates “monomer.” In some embodiments, the TadA* is linked to a Cas9 nickase. In some embodiments, the fusion proteins or complexes of the disclosure comprise as a heterodimer of a wild-type TadA (TadA(wt)) linked to a TadA*. Throughout the present disclosure, an adenosine deaminase base editor that comprises a single TadA* domain and a TadA(wt) domain is indicates using the terminology ABEd or ABE #d, where “#” is an identifying number (e.g., ABE8.20d), where “d” indicates “dimer.” In other embodiments, the fusion proteins or complexes of the disclosure comprise as a heterodimer of a TadA*7.10 linked to a TadA*. In some embodiments, the base editor is ABE8 comprising a TadA* variant monomer. In some embodiments, the base editor is ABE comprising a heterodimer of a TadA* and a TadA(wt). In some embodiments, the base editor is ABE comprising a heterodimer of a TadA* and TadA*7.10. In some embodiments, the base editor is ABE comprising a heterodimer of a TadA*. In some embodiments, the TadA* is selected from Tables 5A-5E.

[0299] In some embodiments, the adenosine deaminase is expressed as a monomer. In other embodiments, the adenosine deaminase is expressed as a heterodimer. In some embodiments, the deaminase or other polypeptide sequence lacks a methionine, for example when included as a component of a fusion protein. This can alter the numbering of positions. However, the skilled person will understand that such corresponding mutations refer to the same mutation.

[0300] Any of the mutations provided herein and any additional mutations (e.g., based on the ecTadA amino acid sequence) can be introduced into any other adenosine deaminases. Any of the mutations provided herein can be made individually or in any combination in a TadA reference sequence or another adenosine deaminase (e.g., ecTadA).

[0301] Details of A to G nucleobase editing proteins are described in International PCT Application No. PCT/US2017/045381 (WO2018/027078) and Gaudelli, N. M., et al., “Programmable base editing of A·T to G·C in genomic DNA without DNA cleavage” Nature, 551, 464-471 (2017), the entire contents of which are hereby incorporated by reference.

### C to T Editing

[0302] In some embodiments, a base editor disclosed herein comprises a fusion protein or complex comprising cytidine deaminase capable of deaminating a target cytidine (C) base of a polynucleotide to produce uridine (U), which has the base pairing properties of thymine. In some embodiments, for example where the polynucleotide is double-stranded (e.g., DNA), the uridine base can then be substituted with a thymidine base (e.g., by cellular repair machinery) to give rise to a C:G to a T:A transition. In other embodiments, deamination of a C to U in a nucleic acid by a base editor cannot be accompanied by substitution of the U to a T.

[0303] The deamination of a target C in a polynucleotide to give rise to a U is a non-limiting example of a type of base editing that can be executed by a base editor described herein. In another example, a base editor comprising a cytidine deaminase domain can mediate conversion of a cytosine (C) base to a guanine (G) base. For example, a U of a polynucleotide produced by deamination of a cytidine by a cytidine deaminase domain of a base editor can be excised from the polynucleotide by a base excision repair mechanism (e.g., by a uracil DNA glycosylase (UDG) domain), producing an abasic site. The nucleobase opposite the abasic site can then be substituted (e.g., by base repair machinery) with another base, such as a C, by for example a translesion polymerase. Although it is typical for a nucleobase opposite an abasic site to be replaced with a C, other substitutions (e.g., A, G or T) can also occur.

[0304] Accordingly, in some embodiments a base editor described herein comprises a deamination domain (e.g., cytidine deaminase domain) capable of deaminating a target C to a U in a polynucleotide. Further, as described below, the base editor can comprise additional domains which facilitate conversion of the U resulting from deamination to, in some embodiments, a T or a G. For example, a base editor comprising a cytidine deaminase domain can further comprise a uracil glycosylase inhibitor (UGI) domain to mediate substitution of a U by a T, completing a C-to-T base editing event. In another example, the base editor can comprise a uracil stabilizing protein as described herein. In another example, a base editor can incorporate a translesion polymerase to improve the efficiency of C-to-G base editing, since a translesion polymerase can facilitate incorporation of a C opposite an abasic site (i.e., resulting in incorporation of a G at the abasic site, completing the C-to-G base editing event).

[0305] A base editor comprising a cytidine deaminase as a domain can deaminate a target C in any polynucleotide, including DNA, RNA and DNA-RNA hybrids.

[0306] In some embodiments, a cytidine deaminase of a base editor comprises all or a portion (e.g., a functional portion) of an apolipoprotein B mRNA editing complex (APOBEC) family deaminase. APOBEC is a family of evolutionarily conserved cytidine deaminases. Members of this family are C-to-U editing enzymes. The N-terminal domain of APOBEC like proteins is the catalytic domain, while the C-terminal domain is a pseudocatalytic domain. More specifically, the catalytic domain is a zinc dependent cytidine deaminase domain and is important for cytidine deamination. APOBEC family members include APOBEC1, APOBEC2, APOBEC3A, APOBEC3B, APOBEC3C, APOBEC3D (“APOBEC3E” now refers to this), APOBEC3F, APOBEC3G, APOBEC3H, APOBEC4, and Activation-induced (cytidine) deaminase.

[0307] Other exemplary deaminases that can be fused to Cas9 according to aspects of this disclosure are provided below. In embodiments, the deaminases are activation-induced deaminases (AID). It should be understood that, in some embodiments, the active domain of the respective sequence can be used, e.g., the domain without a localizing signal (nuclear localization sequence, without nuclear export signal, cytoplasmic localizing signal).

[0308] Some aspects of the present disclosure are based on the recognition that modulating the deaminase domain catalytic activity of any of the fusion proteins or complexes described herein, for example by making point mutations in the deaminase domain, affect the processivity of the fusion proteins (e.g., base editors) or complexes. For example, mutations that reduce, but do not eliminate, the catalytic activity of a deaminase domain within a base editing fusion protein or complexes can make it less likely that the deaminase domain will catalyze the deamination of a residue adjacent to a target residue, thereby narrowing the deamination window. The ability to narrow the deamination window can prevent unwanted deamination of residues adjacent to specific target residues, which can decrease or prevent off-target effects.

[0309] In some embodiments, an APOBEC deaminase incorporated into a base editor can comprise one or more mutations selected from the group consisting of H121R, H122R, R126A, R126E, R118A, W90A, W90Y, and R132E of rAPOBEC1; D316R, D317R, R320A, R320E, R313A, W285A, W285Y, and R326E of hAPOBEC3G; and any alternative mutation at the corresponding position, or one or more corresponding mutations in another APOBEC deaminase.

[0310] A number of modified cytidine deaminases are commercially available, including, but not limited to, SaBE3, SaKKH-BE3, VQR-BE3, EQR-BE3, VRER-BE3, YE1-BE3, EE-BE3, YE2-BE3, and YEE-BE3, which are available from Addgene (plasmids 85169, 85170, 85171, 85172, 85173, 85174, 85175, 85176, 85177). In some embodiments, a deaminase incorporated into a base editor comprises all or a portion (e.g., a functional portion) of an APOBEC1 deaminase.

[0311] In some embodiments, the fusion proteins or complexes of the disclosure comprise one or more cytidine deaminase domains. In some embodiments, the cytidine deaminases provided herein are capable of deaminating cytosine or 5-methylcytosine to uracil or thymine. In some embodiments, the cytidine deaminases provided herein are capable of deaminating cytosine in DNA. The cytidine deaminase may be derived from any suitable organism. In some embodiments, the cytidine deaminase is a naturally-occurring cytidine deaminase that includes one or more mutations corresponding to any of the mutations provided herein. One of skill in the art will be able to identify the corresponding residue in any homologous protein, e.g., by sequence alignment and determination of homologous residues. Accordingly, one of skill in the art would be able to generate mutations in any naturally-occurring cytidine deaminase that corresponds to any of the mutations described herein. In some embodiments, the cytidine deaminase is from a prokaryote. In some embodiments, the cytidine deaminase is from a bacterium. In some embodiments, the cytidine deaminase is from a mammal (e.g., human).

[0312] In some embodiments, the cytidine deaminase comprises an amino acid sequence that is at least 60%, at least 65%, at least 70%, at least 75%, at least 80%, at least 85%, at least 90%, at least 95%, at least 96%, at least 97%, at least 98%, at least 99%, or at least 99.5% identical to any one of the cytidine deaminase amino acid sequences set forth herein. It should be appreciated that cytidine deaminases provided herein may include one or more mutations (e.g., any of the mutations provided herein). Some embodiments provide a polynucleotide molecule encoding the cytidine deaminase nucleobase editor polypeptide of any previous aspect or as delineated herein. In some embodiments, the polynucleotide is codon optimized.

[0313] In embodiments, a fusion protein of the disclosure comprises two or more nucleic acid editing domains.

[0314] Details of C to T nucleobase editing proteins are described in International PCT Application No. PCT/US2016/058344 (WO2017/070632) and Komor, A. C., et al., “Programmable editing of a target base in genomic DNA without double-stranded DNA cleavage” Nature 533, 420-424 (2016), the entire contents of which are hereby incorporated by reference.

### Guide Polynucleotides

[0315] A polynucleotide programmable nucleotide binding domain, when in conjunction with a bound guide polynucleotide (e.g., gRNA), can specifically bind to a target polynucleotide sequence (i.e., via complementary base pairing between bases of the bound guide nucleic acid and bases of the target polynucleotide sequence) and thereby localize the base editor to the target nucleic acid sequence desired to be edited. In some embodiments, the target polynucleotide sequence comprises single-stranded DNA or double-stranded DNA. In some embodiments, the target polynucleotide sequence comprises RNA. In some embodiments, the target polynucleotide sequence comprises a DNA-RNA hybrid.

[0316] In an embodiment, a guide polynucleotide described herein can be RNA or DNA. In one embodiment, the guide polynucleotide is a gRNA.

[0317] In some embodiments, the guide polynucleotide is at least one single guide RNA (“sgRNA” or “gRNA”). In some embodiments, a guide polynucleotide comprises two or more individual polynucleotides, which can interact with one another via for example complementary base pairing (e.g., a dual guide polynucleotide, dual gRNA). For example, a guide polynucleotide can comprise a CRISPR RNA (crRNA) and a trans-activating CRISPR RNA (tracrRNA) or can comprise one or more trans-activating CRISPR RNA (tracrRNA).

[0318] A guide polynucleotide may include natural or non-natural (or unnatural) nucleotides (e.g., peptide nucleic acid or nucleotide analogs). In some cases, the targeting region of a guide nucleic acid sequence (e.g., a spacer) can be at least 15, 16, 17, 18, 19, 20, 21, 22, 23, 24, 25, 26, 27, 28, 29, or 30 nucleotides in length.

[0319] In some embodiments, the methods described herein can utilize an engineered Cas protein. A guide RNA (gRNA) is a short synthetic RNA composed of a scaffold sequence necessary for Cas-binding and a user-defined ˜20 nucleotide spacer that defines the genomic target to be modified. Exemplary gRNA scaffold sequences are provided in the sequence listing as SEQ ID NOs: 317-327 and 3394. Thus, a skilled artisan can change the genomic target of the Cas protein specificity is partially determined by how specific the gRNA targeting sequence is for the genomic target compared to the rest of the genome. In embodiments, the spacer is about 10, 11, 12, 13, 14, 15, 16, 17, 18, 19, 20, 22, 23, 24, 25, or more nucleotides in length. The spacer of a gRNA can be or can be about 19, 20, or 21 nucleotides in length. A gRNA or a guide polynucleotide can target any exon or intron of a gene target. In some embodiments, a composition comprises multiple gRNAs that all target the same exon or multiple gRNAs that target different exons. An exon and/or an intron of a gene can be targeted. A gRNA or a guide polynucleotide can target a nucleic acid sequence of about 20 nucleotides or less than about 20 nucleotides (e.g., at least about 5, 10, 15, 16, 17, 18, 19, 20, 21, 22, 23, 24, 25, 30 nucleotides), or anywhere between about 1-100 nucleotides (e.g., 5, 10, 15, 16, 17, 18, 19, 20, 21, 22, 23, 24, 25, 30, 40, 50, 60, 70, 80, 90, 100). A target nucleic acid sequence can be or can be about 20 bases immediately 5′ of the first nucleotide of the PAM. A gRNA can target a nucleic acid sequence. A target nucleic acid can be at least or at least about 1-10, 1-20, 1-30, 1-40, 1-50, 1-60, 1-70, 1-80, 1-90, or 1-100 nucleotides.

[0320] The guide polynucleotides can comprise standard ribonucleotides, modified ribonucleotides (e.g., pseudouridine), ribonucleotide isomers, and/or ribonucleotide analogs.

[0321] In some embodiments, a base editor system may comprise multiple guide polynucleotides, e.g., gRNAs. For example, the gRNAs may target to one or more target loci (e.g., at least 1 gRNA, at least 2 gRNA, at least 5 gRNA, at least 10 gRNA, at least 20 gRNA, at least 30 g RNA, at least 50 gRNA) comprised in a base editor system. The multiple gRNA sequences can be tandemly arranged and may be separated by a direct repeat.

### Modified Polynucleotides

[0322] To enhance expression, stability, and/or genomic/base editing efficiency, and/or reduce possible toxicity, the base editor-coding sequence (e.g., mRNA) and/or the guide polynucleotide (e.g., gRNA) can be modified to include one or more modified nucleotides and/or chemical modifications, e.g. using pseudo-uridine, 5-Methyl-cytosine, 2′-O-methyl-3′-phosphonoacetate, 2′-O-methyl thioPACE (MSP), 2′-O-methyl-PACE (MP), 2′-fluoro RNA (2′-F-RNA), =constrained ethyl (S-cEt), 2′-O-methyl (‘M’), 2′-O-methyl-3′-phosphorothioate (‘MS’), 2′-O-methyl-3′-thiophosphonoacetate (‘MSP’), 5-methoxyuridine, phosphorothioate, and N1-Methylpseudouridine. Chemically protected gRNAs can enhance stability and editing efficiency in vivo and ex vivo. Methods for using chemically modified mRNAs and guide RNAs are known in the art and described, for example, by Jiang et al., Chemical modifications of adenine base editor mRNA and guide RNA expand its application scope. Nat Commun 11, 1979 (2020). doi.org/10.1038/s41467-020-15892-8, Callum et al., N1-Methylpseudouridine substitution enhances the performance of synthetic mRNA switches in cells, Nucleic Acids Research, Volume 48, Issue 6, 6 Apr. 2020, Page e35, and Andries et al., Journal of Controlled Release, Volume 217, 10 Nov. 2015, Pages 337-344, each of which is incorporated herein by reference in its entirety.

[0323] In some embodiments, the guide polynucleotide comprises one or more modified nucleotides at the 5′ end and/or the 3′ end of the guide. In some embodiments, the guide polynucleotide comprises two, three, four or more modified nucleosides at the 5′ end and/or the 3′ end of the guide. In some embodiments, the guide polynucleotide comprises two, three, four or more modified nucleosides at the 5′ end and/or the 3′ end of the guide.

[0324] In some embodiments, the guide comprises at least about 50%-75% modified nucleotides. In some embodiments, the guide comprises at least about 85% or more modified nucleotides. In some embodiments, at least about 1-5 nucleotides at the 5′ end of the gRNA are modified and at least about 1-5 nucleotides at the 3′ end of the gRNA are modified. In some embodiments, at least about 3-5 contiguous nucleotides at each of the 5′ and 3′ termini of the gRNA are modified. In some embodiments, at least about 20% of the nucleotides present in a direct repeat or anti-direct repeat are modified. In some embodiments, at least about 50% of the nucleotides present in a direct repeat or anti-direct repeat are modified. In some embodiments, at least about 50-75% of the nucleotides present in a direct repeat or anti-direct repeat are modified. In some embodiments, at least about 100 of the nucleotides present in a direct repeat or anti-direct repeat are modified. In some embodiments, at least about 20% or more of the nucleotides present in a hairpin present in the gRNA scaffold are modified. In some embodiments, at least about 50% or more of the nucleotides present in a hairpin present in the gRNA scaffold are modified. In some embodiments, the guide comprises a variable length spacer. In some embodiments, the guide comprises a 20-40 nucleotide spacer. In some embodiments, the guide comprises a spacer comprising at least about 20-25 nucleotides or at least about 30-35 nucleotides. In some embodiments, the spacer comprises modified nucleotides. In some embodiments, the guide comprises two or more of the following:
[0325] at least about 1-5 nucleotides at the 5′ end of the gRNA are modified and at least about 1-5 nucleotides at the 3′ end of the gRNA are modified;
[0326] at least about 20% of the nucleotides present in a direct repeat or anti-direct repeat are modified;
[0327] at least about 50-75% of the nucleotides present in a direct repeat or anti-direct repeat are modified;
[0328] at least about 20% or more of the nucleotides present in a hairpin present in the gRNA scaffold are modified;
[0329] a variable length spacer; and
[0330] a spacer comprising modified nucleotides.

[0331] In embodiments, the gRNA contains numerous modified nucleotides and/or chemical modifications (“heavy mods”). Such heavy mods can increase base editing ˜2 fold in vivo or in vitro. In embodiments, the gRNA comprises 2′-O-methyl or phosphorothioate modifications. In an embodiment, the gRNA comprises 2′-O-methyl and phosphorothioate modifications. In an embodiment, the modifications increase base editing by at least about 2 fold.

[0332] A guide polynucleotide can comprise one or more modifications to provide a nucleic acid with a new or enhanced feature. A guide polynucleotide can comprise a nucleic acid affinity tag. A guide polynucleotide can comprise synthetic nucleotide, synthetic nucleotide analog, nucleotide derivatives, and/or modified nucleotides.

[0333] A gRNA or a guide polynucleotide can also be modified by 5′ adenylate, 5′ guanosine-triphosphate cap, 5′ N7-Methylguanosine-triphosphate cap, 5′ triphosphate cap, 3′ phosphate, 3′ thiophosphate, 5′ phosphate, 5′ thiophosphate, Cis-Syn thymidine dimer, trimers, C12 spacer, C3 spacer, C6 spacer, dSpacer, PC spacer, rSpacer, Spacer 18, Spacer 9, 3′-3′ modifications, 2′-O-methyl thioPACE (MSP), 2′-O-methyl-PACE (MP), and constrained ethyl (S-cEt), 5′-5′ modifications, abasic, acridine, azobenzene, biotin, biotin BB, biotin TEG, cholesteryl TEG, desthiobiotin TEG, DNP TEG, DNP-X, DOTA, dT-Biotin, dual biotin, PC biotin, psoralen C2, psoralen C6, TINA, 3′ DABCYL, black hole quencher 1, black hole quencher 2, DABCYL SE, dT-DABCYL, IRDye QC-1, QSY-21, QSY-35, QSY-7, QSY-9, carboxyl linker, thiol linkers, 2′-deoxyribonucleoside analog purine, 2′-deoxyribonucleoside analog pyrimidine, ribonucleoside analog, 2′-O-methyl ribonucleoside analog, sugar modified analogs, wobble/universal bases, fluorescent dye label, 2′-fluoro RNA, 2′-O-methyl RNA, methylphosphonate, phosphodiester DNA, phosphodiester RNA, phosphothioate DNA, phosphorothioate RNA, UNA, pseudouridine-5′-triphosphate, 5′-methylcytidine-5′-triphosphate, or any combination thereof.

[0334] In some cases, a phosphorothioate enhanced RNA gRNA can inhibit RNase A, RNase T1, calf serum nucleases, or any combinations thereof. These properties can allow the use of PS-RNA gRNAs to be used in applications where exposure to nucleases is of high probability in vivo or in vitro. For example, phosphorothioate (PS) bonds can be introduced between the last 3-5 nucleotides at the 5′- or 3′-end of a gRNA which can inhibit exonuclease degradation. In some cases, phosphorothioate bonds can be added throughout an entire gRNA to reduce attack by endonucleases.

### Fusion Proteins or Complexes Comprising a Nuclear Localization Sequence (NLS)

[0335] In some embodiments, the fusion proteins or complexes provided herein further comprise one or more (e.g., 2, 3, 4, 5) nuclear targeting sequences, for example a nuclear localization sequence (NLS). In one embodiment, a bipartite NLS is used. In some embodiments, a NLS comprises an amino acid sequence that facilitates the importation of a protein, that comprises an NLS, into the cell nucleus (e.g., by nuclear transport). In some embodiments, the NLS is fused to the N-terminus or the C-terminus of the fusion protein. In some embodiments, the NLS is fused to the C-terminus or N-terminus of an nCas9 domain or a dCas9 domain. In some embodiments, the NLS is fused to the N-terminus or C-terminus of the Cas12 domain. In some embodiments, the NLS is fused to the N-terminus or C-terminus of the cytidine or adenosine deaminase. In some embodiments, the NLS is fused to the fusion protein via one or more linkers. In some embodiments, the NLS is fused to the fusion protein without a linker. In some embodiments, the NLS comprises an amino acid sequence of any one of the NLS sequences provided or referenced herein. Additional nuclear localization sequences are known in the art and would be apparent to the skilled artisan. For example, NLS sequences are described in Plank et al., PCT/EP2000/011690, the contents of which are incorporated herein by reference for their disclosure of exemplary nuclear localization sequences.

[0336] In some embodiments, the NLS is present in a linker or the NLS is flanked by linkers, for example described herein. A bipartite NLS comprises two basic amino acid clusters, which are separated by a relatively short spacer sequence (hence bipartite—2 parts, while monopartite NLSs are not). The NLS of nucleoplasmin, KR [PAATKKAGQA]KKKK (SEQ ID NO: 191), is the prototype of the ubiquitous bipartite signal: two clusters of basic amino acids, separated by a spacer of about 10 amino acids. The sequence of an exemplary bipartite NLS follows:

(SEQ ID NO: 328)
PKKKRKVEGADKRTADGSEFESPKKKRKV

### Additional Domains

[0337] A base editor described herein can include any domain which helps to facilitate the nucleobase editing, modification or altering of a nucleobase of a polynucleotide. In some embodiments, a base editor comprises a polynucleotide programmable nucleotide binding domain (e.g., Cas9), a nucleobase editing domain (e.g., deaminase domain), and one or more additional domains. In some embodiments, the additional domain can facilitate enzymatic or catalytic functions of the base editor, binding functions of the base editor, or be inhibitors of cellular machinery (e.g., enzymes) that could interfere with the desired base editing result. In some embodiments, a base editor comprises a nuclease, a nickase, a recombinase, a deaminase, a methyltransferase, a methylase, an acetylase, an acetyltransferase, a transcriptional activator, or a transcriptional repressor domain.

[0338] In some embodiments, a base editor comprises an uracil glycosylase inhibitor (UGI) domain. In some embodiments, cellular DNA repair response to the presence of U: G heteroduplex DNA can be responsible for a decrease in nucleobase editing efficiency in cells. In such embodiments, uracil DNA glycosylase (UDG) can catalyze removal of U from DNA in cells, which can initiate base excision repair (BER), mostly resulting in reversion of the U:G pair to a C:G pair. In such embodiments, BER can be inhibited in base editors comprising one or more domains that bind the single strand, block the edited base, inhibit UGI, inhibit BER, protect the edited base, and/or promote repairing of the non-edited strand. Thus, this disclosure contemplates a base editor fusion protein or complex comprising a UGI domain and/or a uracil stabilizing protein (USP) domain.

### Base Editor System

[0339] Provided herein are systems, compositions, and methods for editing a nucleobase using a base editor system. In some embodiments, the base editor system comprises (1) a base editor (BE) comprising a polynucleotide programmable nucleotide binding domain and a nucleobase editing domain (e.g., a deaminase domain) for editing the nucleobase; and (2) a guide polynucleotide (e.g., guide RNA) in conjunction with the polynucleotide programmable nucleotide binding domain. In some embodiments, the base editor system is a cytidine base editor (CBE) or an adenosine base editor (ABE). In some embodiments, the polynucleotide programmable nucleotide binding domain is a polynucleotide programmable DNA or RNA binding domain. In some embodiments, the nucleobase editing domain is a deaminase domain. In some embodiments, a deaminase domain can be a cytidine deaminase or an cytosine deaminase. In some embodiments, a deaminase domain can be an adenine deaminase or an adenosine deaminase. In some embodiments, the adenosine base editor can deaminate adenine in DNA. In some embodiments, the base editor is capable of deaminating a cytidine in DNA.

[0340] Use of the base editor system provided herein comprises the steps of: (a) contacting a target nucleotide sequence of a polynucleotide (e.g., double- or single stranded DNA or RNA) of a subject with a base editor system comprising a nucleobase editor (e.g., an adenosine base editor or a cytidine base editor) and a guide polynucleotide (e.g., gRNA), wherein the target nucleotide sequence comprises a targeted nucleobase pair; (b) inducing strand separation of said target region; (c) converting a first nucleobase of said target nucleobase pair in a single strand of the target region to a second nucleobase; and (d) cutting no more than one strand of said target region, where a third nucleobase complementary to the first nucleobase base is replaced by a fourth nucleobase complementary to the second nucleobase. It should be appreciated that in some embodiments, step (b) is omitted. In some embodiments, said targeted nucleobase pair is a plurality of nucleobase pairs in one or more genes. In some embodiments, the base editor system provided herein is capable of multiplex editing of a plurality of nucleobase pairs in one or more genes. In some embodiments, the plurality of nucleobase pairs is located in the same gene. In some embodiments, the plurality of nucleobase pairs is located in one or more genes, wherein at least one gene is located in a different locus.

[0341] The components of a base editor system (e.g., a deaminase domain, a guide RNA, and/or a polynucleotide programmable nucleotide binding domain) may be associated with each other covalently or non-covalently. For example, in some embodiments, the deaminase domain can be targeted to a target nucleotide sequence by a polynucleotide programmable nucleotide binding domain, optionally where the polynucleotide programmable nucleotide binding domain is complexed with a polynucleotide (e.g., a guide RNA). In some embodiments, a polynucleotide programmable nucleotide binding domain can be fused or linked to a deaminase domain. In some embodiments, a polynucleotide programmable nucleotide binding domain can target a deaminase domain to a target nucleotide sequence by non-covalently interacting with or associating with the deaminase domain. For example, in some embodiments, the nucleobase editing component (e.g., the deaminase component) comprises an additional heterologous portion or domain that is capable of interacting with, associating with, or capable of forming a complex with a corresponding heterologous portion, antigen, or domain that is part of a polynucleotide programmable nucleotide binding domain and/or a guide polynucleotide (e.g., a guide RNA) complexed therewith. In some embodiments, the polynucleotide programmable nucleotide binding domain, and/or a guide polynucleotide (e.g., a guide RNA) complexed therewith, comprises an additional heterologous portion or domain that is capable of interacting with, associating with, or capable of forming a complex with a corresponding heterologous portion, antigen, or domain that is part of a nucleobase editing domain (e.g., the deaminase component). In some embodiments, the additional heterologous portion may be capable of binding to, interacting with, associating with, or forming a complex with a polypeptide. In some embodiments, the additional heterologous portion may be capable of binding to, interacting with, associating with, or forming a complex with a polynucleotide. In some embodiments, the additional heterologous portion may be capable of binding to a guide polynucleotide. In some embodiments, the additional heterologous portion may be capable of binding to a polypeptide linker. In some embodiments, the additional heterologous portion is capable of binding to a polynucleotide linker. An additional heterologous portion may be a protein domain. In some embodiments, an additional heterologous portion comprises a polypeptide, such as a 22 amino acid RNA-binding domain of the lambda bacteriophage antiterminator protein N (N22p), a 2G12 IgG homodimer domain, an ABI, an antibody (e.g. an antibody that binds a component of the base editor system or a heterologous portion thereof) or fragment thereof (e.g. heavy chain domain 2 (CH2) of IgM (MHD2) or IgE (EHD2), an immunoglobulin Fc region, a heavy chain domain 3 (CH3) of IgG or IgA, a heavy chain domain 4 (CH4) of IgM or IgE, an Fab, an Fab2, miniantibodies, and/or ZIP antibodies), a barnase-barstar dimer domain, a Bcl-xL domain, a Calcineurin A (CAN) domain, a Cardiac phospholamban transmembrane pentamer domain, a collagen domain, a Com RNA binding protein domain (e.g. SfMu Com coat protein domain, and SfMu Com binding protein domain), a Cyclophilin-Fas fusion protein (CyP-Fas) domain, a Fab domain, an Fc domain, a fibritin foldon domain, an FK506 binding protein (FKBP) domain, an FKBP binding domain (FRB) domain of mTOR, a foldon domain, a fragment X domain, a GAI domain, a GID1 domain, a Glycophorin A transmembrane domain, a GyrB domain, a Halo tag, an HIV Gp41 trimerisation domain, an HPV45 oncoprotein E7 C-terminal dimer domain, a hydrophobic polypeptide, a K Homology (KH) domain, a Ku protein domain (e.g., a Ku heterodimer), a leucine zipper, a LOV domain, a mitochondrial antiviral-signaling protein CARD filament domain, an MS2 coat protein domain (MCP), a non-natural RNA aptamer ligand that binds a corresponding RNA motif/aptamer, a parathyroid hormone dimerization domain, a PP7 coat protein (PCP) domain, a PSD95-Dlgl-zo-1 (PDZ) domain, a PYL domain, a SNAP tag, a SpyCatcher moiety, a SpyTag moiety, a streptavidin domain, a streptavidin-binding protein domain, a streptavidin binding protein (SBP) domain, a telomerase Sm7 protein domain (e.g. Sm7 homoheptamer or a monomeric Sm-like protein), and/or fragments thereof. In embodiments, an additional heterologous portion comprises a polynucleotide (e.g., an RNA motif), such as an MS2 phage operator stem-loop (e.g., an MS2, an MS2 C-5 mutant, or an MS2 F-5 mutant), a non-natural RNA motif, a PP7 operator stem-loop, an SfMu phate Com stem-loop, a steril alpha motif, a telomerase Ku binding motif, a telomerase Sm7 binding motif, and/or fragments thereof. Non-limiting examples of additional heterologous portions include polypeptides with at least about 85% sequence identity to any one or more of SEQ ID NOs: 380, 382, 384, 386-388, or fragments thereof. Non-limiting examples of additional heterologous portions include polynucleotides with at least about 85% sequence identity to any one or more of SEQ ID NOs: 379, 381, 383, 385, or fragments thereof.

[0342] In some instances, components of the base editing system are associated with one another through the interaction of leucine zipper domains (e.g., SEQ ID NOs: 387 and 388). In some cases, components of the base editing system are associated with one another through polypeptide domains (e.g., FokI domains) that associate to form protein complexes containing about, at least about, or no more than about 1, 2 (i.e., dimerize), 3, 4, 5, 6, 7, 8, 9, polypeptide domain units, optionally the polypeptide domains may include alterations that reduce or eliminate an activity thereof.

[0343] In some instances, components of the base editing system are associated with one another through the interaction of multimeric antibodies or fragments thereof (e.g., IgG, IgD, IgA, IgM, IgE, a heavy chain domain 2 (CH2) of IgM (MHD2) or IgE (EHD2), an immunoglobulin Fc region, a heavy chain domain 3 (CH3) of IgG or IgA, a heavy chain domain 4 (CH4) of IgM or IgE, an Fab, and an Fab2). In some instances, the antibodies are dimeric, trimeric, or tetrameric. In embodiments, the dimeric antibodies bind a polypeptide or polynucleotide component of the base editing system.

[0344] In some cases, components of the base editing system are associated with one another through the interaction of a polynucleotide-binding protein domain(s) with a polynucleotide(s). In some instances, components of the base editing system are associated with one another through the interaction of one or more polynucleotide-binding protein domains with polynucleotides that are self-complementary and/or complementary to one another so that complementary binding of the polynucleotides to one another brings into association their respective bound polynucleotide-binding protein domain(s).

[0345] In some instances, components of the base editing system are associated with one another through the interaction of a polypeptide domain(s) with a small molecule(s) (e.g., chemical inducers of dimerization (CIDs), also known as “dimerizers”). Non-limiting examples of CIDs include those disclosed in Amara, et al., “A versatile synthetic dimerizer for the regulation of protein-protein interactions,” PNAS, 94:10618-10623 (1997); and Voβ, et al. “Chemically induced dimerization: reversible and spatiotemporal control of protein function in cells,” Current Opinion in Chemical Biology, 28:194-201 (2015), the disclosures of each of which are incorporated herein by reference in their entireties for all purposes. In some embodiments, the base editor inhibits base excision repair (BER) of the edited strand. In some embodiments, the base editor protects or binds the non-edited strand. In some embodiments, the base editor comprises UGI activity or USP activity. In some embodiments, the base editor comprises a catalytically inactive inosine-specific nuclease.

[0346] The base editors of the present disclosure can comprise any domain, feature or amino acid sequence which facilitates the editing of a target polynucleotide sequence. For example, in some embodiments, the base editor comprises a nuclear localization sequence (NLS). In some embodiments, an NLS of the base editor is localized between a deaminase domain and a polynucleotide programmable nucleotide binding domain. In some embodiments, an NLS of the base editor is localized C-terminal to a polynucleotide programmable nucleotide binding domain.

[0347] Protein domains included in the fusion protein can be a heterologous functional domain. Non-limiting examples of protein domains which can be included in the fusion protein include a deaminase domain (e.g., cytidine deaminase and/or adenosine deaminase), a uracil glycosylase inhibitor (UGI) domain, epitope tags, and reporter gene sequences. In some embodiments, the adenosine base editor (ABE) can deaminate adenine in DNA. In some embodiments, ABE is generated by replacing APOBEC1 component of BE3 with natural or engineered E. coli TadA, human ADAR2, mouse ADA, or human ADAT2. In some embodiments, ABE comprises an evolved TadA variant. In some embodiments, the base editor is ABE8.1, which comprises or consists essentially of the following sequence or a fragment thereof having adenosine deaminase activity: SEQ ID NO: 331. Other ABE8 sequences are provided in the attached sequence listing (SEQ ID NOs: 332-354).

[0348] In some embodiments, the base editor includes an adenosine deaminase variant comprising an amino acid sequence, which contains alterations relative to an ABE 7*10 reference sequence, as described herein. The term “monomer” as used in Table 7 refers to a monomeric form of TadA*7.10 comprising the alterations described. The term “heterodimer” as used in Table 7 refers to the specified wild-type E. co/i TadA adenosine deaminase fused to a TadA*7.10 comprising the alterations as described.

TABLE 7
Adenosine Deaminase Base Editor Variants

| | Adenosine | |
|---|---|---|
| ABE | Deaminase | Adenosine Deaminase Description |
| ABE-605m | MSP605 | monomer_TadA*7.10 + V82G + Y147T + Q154S |
| ABE-680m | MSP680 | monomer_TadA*7.10 + I76Y + V82G + Y147T + Q154S |
| ABE-823m | MSP823 | monomer_TadA*7.10 + L36H + V82G + Y147T + Q154S + |
| | | N157K |
| ABE-824m | MSP824 | monomer_TadA*7.10 + V82G + Y147D + F149Y + Q154S + |
| | | D167N |
| ABE-825m | MSP825 | monomer_TadA*7.10 + L36H + V82G+ Y147D + F149Y + |
| | | Q154S + N157K + D167N |
| ABE-827m | MSP827 | monomer_TadA*7.10 + L36H + I76Y + V82G + Y147T + |
| | | Q154S + N157K |
| ABE-828m | MSP828 | monomer_TadA*7.10 + I76Y + V82G + Y147D + F149Y + |
| | | Q154S + D167N |
| ABE-829m | MSP829 | monomer_TadA*7.10 + L36H + I76Y + V82G + Y147D + |
| | | F149Y+ Q154S + N157K + D167N |
| ABE-605d | MSP605 | heterodimer_(WT) + (TadA*7.10 + V82G + Y147T + Q154S) |
| ABE-680d | MSP680 | heterodimer_(WT) + (TadA*7.10 + I76Y + V82G + Y147T + |
| | | Q154S) |
| ABE-823d | MSP823 | heterodimer_(WT) + (TadA*7.10 + L36H + V82G + Y147T + |
| | | Q154S + N157K) |
| ABE-824d | MSP824 | heterodimer_(WT) + (TadA*7.10 + V82G + Y147D + F149Y + |
| | | Q154S + D167N) |
| ABE-825d | MSP825 | heterodimer_(WT) + (TadA*7.10 + L36H + V82G + Y147D + |
| | | F149Y + Q154S + N157K + D167N) |
| ABE-827d | MSP827 | heterodimer_(WT) + (TadA*7.10 + L36H + I76Y + V82G + |
| | | Y147T + Q154S + N157K) |
| ABE-828d | MSP828 | heterodimer_(WT) + (TadA*7.10 + I76Y + V82G + Y147D + |
| | | F149Y + Q154S + D167N) |
| ABE-829d | MSP829 | heterodimer_(WT) + (TadA*7.10 + L36H + I76Y + V82G + |
| | | Y147D + F149Y + Q154S + N157K + D167N) |

[0349] In some embodiments, the base editor comprises a domain comprising all or a portion (e.g., a functional portion) of a uracil glycosylase inhibitor (UGI) or a uracil stabilizing protein (USP) domain.

### Linkers

[0350] In certain embodiments, linkers may be used to link any of the peptides or peptide domains of the disclosure. The linker may be as simple as a covalent bond, or it may be a polymeric linker many atoms in length. In certain embodiments, the linker is a polypeptide or based on amino acids. In other embodiments, the linker is not peptide-like. In certain embodiments, the linker is a covalent bond (e.g., a carbon-carbon bond, disulfide bond, carbon-heteroatom bond, etc.).

[0351] In some embodiments, any of the fusion proteins provided herein, comprise a cytidine or adenosine deaminase and a Cas9 domain that are fused to each other via a linker. Various linker lengths and flexibilities between the cytidine or adenosine deaminase and the Cas9 domain can be employed (e.g., ranging from very flexible linkers of the form (GGGS) n (SEQ ID NO: 246), (GGGGS)n (SEQ ID NO: 247), and (G)n to more rigid linkers of the form (EAAAK)n (SEQ ID NO: 248), (SGGS)n (SEQ ID NO: 355), SGSETPGTSESATPES (SEQ ID NO: 249) (see, e.g., Guilinger J P, et al. Fusion of catalytically inactive Cas9 to FokI nuclease improves the specificity of genome modification. Nat. Biotechnol. 2014; 32(6): 577-82; the entire contents are incorporated herein by reference) and (XP)n) in order to achieve the optimal length for activity for the cytidine or adenosine deaminase nucleobase editor. In some embodiments, n is 1, 2, 3, 4, 5, 6, 7, 8, 9, 10, 11, 12, 13, 14, or 15. In some embodiments, the linker comprises a (GGS)n motif, wherein n is 1, 3, or 7. In some embodiments, cytidine deaminase or adenosine deaminase and the Cas9 domain of any of the fusion proteins provided herein are fused via a linker comprising the amino acid sequence SGSETPGTSESATPES (SEQ ID NO: 249), which can also be referred to as the XTEN linker.

[0352] In some embodiments, the domains of the base editor are fused via a linker that comprises the amino acid sequence of:

(SEQ ID NO: 356)
SGGSSGSETPGTSESATPESSGGS,
(SEQ ID NO: 357)
SGGSSGGSSGSETPGTSESATPESSGGSSGGS,
or
(SEQ ID NO: 358)
GGSGGSPGSPAGSPTSTEEGTSESATPESGPGTSTEPSEGSAPGSPAGS
PTSTEEGTSTEPSEGSAPGTSTEPSEGSAPGTSESATPESGPGSEPATS
GGSGGS.

[0353] In some embodiments, domains of the base editor are fused via a linker comprising the amino acid sequence SGSETPGTSESATPES (SEQ ID NO: 249), which may also be referred to as the XTEN linker. In some embodiments, a linker comprises the amino acid sequence SGGS (SEQ ID NO: 355). In some embodiments, the linker is 24 amino acids in length. In some embodiments, the linker comprises the amino acid sequence SGGSSGGSSGSETPGTSESATPES (SEQ ID NO: 359). In some embodiments, the linker is amino acids in length. In some embodiments, the linker comprises the amino acid sequence: SGGSSGGSSGSETPGTSESATPESSGGSSGGSSGGSSGGS (SEQ ID NO: 360). In some embodiments, the linker is 64 amino acids in length. In some embodiments, the linker comprises the amino acid sequence: SGGSSGGSSGSETPGTSESATPESSGGSSGGSSGGSSGGSSGSETPGTSESATPESSGGSSG GS (SEQ ID NO: 361). In some embodiments, the linker is 92 amino acids in length. In some embodiments, the linker comprises the amino acid sequence:

(SEQ ID NO: 362)
PGSPAGSPTSTEEGTSESATPESGPGTSTEPSEGSAPGSPAGSPTSTEE
GTSTEPSEGSAPGTSTEPSEGSAPGTSESATPESGPGSEPATS.

[0354] In some embodiments, a linker comprises a plurality of proline residues and is 5-21, 5-14, 5-9, 5-7 amino acids in length, e.g., PAPAP (SEQ ID NO: 363), PAPAPA (SEQ ID NO: 364), PAPAPAP (SEQ ID NO: 365), PAPAPAPA (SEQ ID NO: 366), P(AP)4 (SEQ ID NO: 367), P(AP)7 (SEQ ID NO: 368), P(AP)10 (SEQ ID NO: 369) (see, e.g., Tan J, Zhang F, Karcher D, Bock R. Engineering of high-precision base editors for site-specific single nucleotide replacement. Nat Commun. 2019 Jan. 25; 10(1):439; the entire contents are incorporated herein by reference). Such proline-rich linkers are also termed “rigid” linkers.

Nucleic Acid Programmable DNA Binding Proteins with Guide RNAs

[0355] Provided herein are compositions and methods for base editing in cells. Further provided herein are compositions comprising a guide polynucleotide sequence, e.g., a guide RNA sequence, or a combination of 2, 3, 4, 5, 6, 7, 8, 9, 10, 11, 12, 13, 14, 15, 16, 17, 18, 19, 20, or more guide RNAs as provided herein. In some embodiments, a composition for base editing as provided herein further comprises a polynucleotide that encodes a base editor, e.g., a C-base editor or an A-base editor. For example, a composition for base editing may comprise a mRNA sequence encoding a BE, a BE4, an ABE, and a combination of one or more guide RNAs as provided. A composition for base editing may comprise a base editor polypeptide and a combination of one or more of any guide RNAs provided herein. Such a composition may be used to effect base editing in a cell through different delivery approaches, for example, electroporation, nucleofection, viral transduction or transfection. In some embodiments, the composition for base editing comprises an mRNA sequence that encodes a base editor and a combination of one or more guide RNA sequences provided herein for electroporation.

[0356] Some aspects of this disclosure provide systems comprising any of the fusion proteins or complexes provided herein, and a guide RNA bound to a nucleic acid programmable DNA binding protein (napDNAbp) domain (e.g., a Cas9 (e.g., a dCas9, a nuclease active Cas9, or a Cas9 nickase) or Cas12) of the fusion protein or complex. These complexes are also termed ribonucleoproteins (RNPs). In some embodiments, the guide nucleic acid (e.g., guide RNA) is from 15-100 nucleotides long and comprises a sequence of at least 10 contiguous nucleotides that is complementary to a target sequence. In some embodiments, the target sequence is a DNA sequence. In some embodiments, the target sequence is an RNA sequence. In some embodiments, the target sequence is a sequence in the genome of a bacteria, yeast, fungi, insect, plant, or animal. In some embodiments, the target sequence is a sequence in the genome of a human. In some embodiments, the 3′ end of the target sequence is immediately adjacent to a canonical PAM sequence (NGG). In some embodiments, the 3′ end of the target sequence is immediately adjacent to a non-canonical PAM sequence (e.g., a sequence listed in Table 3 or 5′-NAA-3′). In some embodiments, the guide nucleic acid (e.g., guide RNA) is complementary to a sequence in a gene of interest (e.g., a gene associated with a disease or disorder).

[0357] Some aspects of this disclosure provide methods of using the fusion proteins, or complexes provided herein. For example, some aspects of this disclosure provide methods comprising contacting a DNA molecule with any of the fusion proteins or complexes provided herein, and with at least one guide RNA, wherein the guide RNA is about 15-100 nucleotides long and comprises a sequence of at least 10 contiguous nucleotides that is complementary to a target sequence.

[0358] The domains of the base editor disclosed herein can be arranged in any order.

[0359] A defined target region can be a deamination window. A deamination window can be the defined region in which a base editor acts upon and deaminates a target nucleotide. In some embodiments, the deamination window is within a 2, 3, 4, 5, 6, 7, 8, 9, or 10 base regions. In some embodiments, the deamination window is 5, 6, 7, 8, 9, 10, 11, 12, 13, 14, 15, 16, 17, 18, 19, 20, 21, 22, 23, 24, or 25 bases upstream of the PAM.

[0360] The base editors of the present disclosure can comprise any domain, feature or amino acid sequence which facilitates the editing of a target polynucleotide sequence.

### Methods of Using Fusion Proteins or Complexes Comprising a Cytidine or Adenosine Deaminase and a Cas9 Domain

[0361] Some aspects of this disclosure provide methods of using the fusion proteins, or complexes provided herein. For example, some aspects of this disclosure provide methods comprising contacting a DNA molecule with any of the fusion proteins or complexes provided herein, and with at least one guide RNA described herein.

[0362] In some embodiments, a fusion protein or complex of the disclosure is used for editing a target gene of interest. In particular, a cytidine deaminase or adenosine deaminase nucleobase editor described herein is capable of making multiple mutations within a target sequence. These mutations may affect the function of the target. For example, when a cytidine deaminase or adenosine deaminase nucleobase editor is used to target a regulatory region the function of the regulatory region is altered and the expression of the downstream protein is reduced or eliminated.

### Multiplex Editing

[0363] In some embodiments, the base editor system provided herein is capable of multiplex editing of a plurality of nucleobase pairs in one or more genes or polynucleotide sequences. In some embodiments, the plurality of nucleobase pairs is located in the same gene or in one or more genes, wherein at least one gene is located in a different locus. In some embodiments, the multiplex editing comprises one or more guide polynucleotides. In some embodiments, the multiplex editing comprises one or more base editor systems. In some embodiments, the multiplex editing comprises one or more base editor systems with a single guide polynucleotide or a plurality of guide polynucleotides. In some embodiments, the multiplex editing comprises one or more guide polynucleotides with a single base editor system. It should be appreciated that the characteristics of the multiplex editing using any of the base editors as described herein can be applied to any combination of methods using any base editor provided herein. It should also be appreciated that the multiplex editing using any of the base editors as described herein can comprise a sequential editing of a plurality of nucleobase pairs.

[0364] In some embodiments, the base editor system capable of multiplex editing of a plurality of nucleobase pairs in one or more genes comprises one of ABE7, ABE8, and/or ABE9 base editors.

### Expression of Fusion Proteins or Complexes in a Host Cell

[0365] Polypeptides of the present disclosure may be expressed in virtually any host cell of interest, including mammalian cells (e.g., human cells). In some embodiments, the host cell is an immune cell (e.g., a T cell, such as a regulatory T (T_{REG}) cell). In some embodiments, the host cell is an allogeneic immune cell (e.g., a T_{REG} cell). In some embodiments, the host cell is a CAR T_{REG} cell.

[0366] For example, a DNA encoding a polypeptide of the present disclosure can be cloned by designing suitable primers for the upstream and downstream of CDS based on the cDNA sequence. The cloned DNA may be directly, or after digestion with a restriction enzyme when desired, or after addition of a suitable linker and/or a nuclear localization signal, ligated with a DNA encoding one or more additional components of a base editing system. The base editing system is translated in a host cell to form a complex.

[0367] A DNA encoding a protein domain described herein can be obtained by chemically synthesizing the DNA, or by connecting synthesized partly overlapping oligoDNA short chains by utilizing the PCR method and the Gibson Assembly method to construct a DNA encoding the full length thereof. The advantage of constructing a full-length DNA by chemical synthesis or a combination of PCR method or Gibson Assembly method is that the codon to be used can be designed in CDS full-length according to the host into which the DNA is introduced. In the expression of a heterologous DNA, the protein expression level is expected to increase by converting the DNA sequence thereof to a codon highly frequently used in the host organism. As the data of codon use frequency in host to be used, for example, the genetic code use frequency database (kazusa.or.jp/codon/index.html) disclosed in the home page of Kazusa DNA Research Institute can be used, or documents showing the codon use frequency in each host may be referred to. By reference to the obtained data and the DNA sequence to be introduced, codons showing low use frequency in the host from among those used for the DNA sequence may be converted to a codon coding the same amino acid and showing high use frequency.

[0368] An expression vector containing a DNA encoding a nucleic acid sequence-recognizing module and/or a nucleic acid base converting enzyme can be produced, for example, by linking the DNA to the downstream of a promoter in a suitable expression vector.

[0369] As the expression vector, animal cell expression plasmids (e.g., pA1-11, pXT1, pRc/CMV, pRc/RSV, pcDNAI/Neo); and animal virus vectors such as retrovirus, vaccinia virus, adenovirus and the like, and the like are used.

[0370] Regarding the promoter to be used, any promoter appropriate for a host to be used for gene expression can be used. In a conventional method using double-stranded breaks, since the survival rate of the host cell sometimes decreases markedly due to the toxicity, it is desirable to increase the number of cells by the start of the induction by using an inductive promoter. However, since sufficient cell proliferation can also be afforded by expressing the nucleic acid-modifying enzyme complex of the present disclosure, a constitutive promoter can be used without limitation.

[0371] For example, when the host is an animal cell, an SRα promoter, SV40 promoter, LTR promoter, cytomegalovirus (CMV) promoter, Rous sarcoma virus (RSV) promoter, Moloney mouse leukemia virus (MoMuLV), LTR, herpes simplex virus thymidine kinase (HSV-TK) promoter, and the like can be used. Of these, CMV promoter, SR.alpha. promoter and the like may be used.

[0372] Expression vectors for use in embodiments of the present disclosure, besides those mentioned above, can comprise an enhancer, a splicing signal, a terminator, a polyA addition signal, a selection marker such as drug resistance gene, an auxotrophic complementary gene and the like, a replication origin, and the like can be used.

[0373] An RNA encoding a protein domain described herein can be prepared by, for example, in vitro transcription of a nucleic acid sequence encoding any of the polypeptides disclosed herein. A polypeptide of the present disclosure can be intracellularly expressed by introducing into the cell an expression vector comprising a nucleic acid sequence encoding the polypeptide.

[0374] Animal cells contemplated in the present disclosure include, but are not limited to, cell lines such as monkey COS-7 cells, monkey Vero cells, Chinese hamster ovary (CHO) cells, dhfr gene-deficient CHO cells, mouse L cells, mouse AtT-20 cells, mouse myeloma cells, rat GH3 cells, human FL cells and the like, pluripotent stem cells such as iPS cells, ES cells derived humans and other mammals, and primary cultured cells prepared from various tissues. Furthermore, zebrafish embryo, Xenopus oocyte, and the like can also be used.

[0375] All the above-mentioned host cells may be haploid (monoploid), or polyploid (e.g., diploid, triploid, tetraploid, etc.). Using conventional methods, mutations, in principle, introduced into only one homologous chromosome produce a heterogenous cell. Therefore, the desired phenotype is not expressed unless the mutation is dominant. For recessive mutations, acquiring a homozygous cell can be inconvenient due to labor and time requirements. In contrast, according to the present disclosure, since a mutation can be introduced into any allele on the homologous chromosome in the genome, the desired phenotype can be expressed in a single generation even in the case of recessive mutation, thereby solving the problem associated with conventional mutagenesis methods.

[0376] An expression vector can be introduced by a known method (e.g., the lysozyme method, the competent method, the PEG method, the CaCl₂) coprecipitation method, electroporation, microinjection, particle gun method, lipofection, Agrobacterium-mediated delivery, etc.) according to the kind of the host.

[0377] A vector can be introduced into an animal cell according to the methods described in, for example, Cell Engineering additional volume 8, New Cell Engineering Experiment Protocol, 263-267 (1995) (published by Shujunsha), and Virology, 52, 456 (1973).

[0378] As a medium for culturing an animal cell, for example, minimum essential medium (MEM) containing about 5 to about 20% of fetal bovine serum [Science, 122, 501 (1952)], Dulbecco's modified Eagle medium (DMEM) [Virology, 8, 396 (1959)], RPMI 1640 medium [The Journal of the American Medical Association, 199, 519 (1967)], 199 medium [Proceeding of the Society for the Biological Medicine, 73, 1 (1950)] and the like are used. The pH of the medium may be from about 6 to about 8. The culture is performed at generally about 30° C. to about 40° C. Where necessary, aeration and stirring may be performed.

[0379] When a higher eukaryotic cell, such as animal cell, is used as a host cell, a DNA encoding a base editing system of the present disclosure is introduced into a host cell under the regulation of an inducible promoter (e.g., metallothionein promoter (induced by heavy metal ion), heat shock protein promoter (induced by heat shock), Tet-ON/Tet-OFF system promoter (induced by addition or removal of tetracycline or a derivative thereof), steroid-responsive promoter (induced by steroid hormone or a derivative thereof) etc.), the induction substance is added to the medium (or removed from the medium) at an appropriate stage to induce expression of the nucleic acid-modifying enzyme complex, culture is performed for a given period to carry out a base editing and, introduction of a mutation into a target gene, transient expression of the base editing system can be realized.

[0380] Alternatively, the above-mentioned inductive promoter can also be utilized as a vector removal mechanism when higher eukaryotic cells, such as animal cells, and the like are used as a host cell. That is, a vector is mounted with a replication origin that functions in a host cell, and a nucleic acid encoding a protein necessary for replication (e.g., SV40 on and large T antigen, oriP and EBNA-1 etc. for animal cells), of the expression of the nucleic acid encoding the protein is regulated by the above-mentioned inducible promoter. As a result, while the vector is autonomously replicable in the presence of an induction substance, when the induction substance is removed, autonomous replication is not available, and the vector naturally falls off along with cell division (autonomous replication is not possible by the addition of tetracycline and doxycycline in Tet-OFF system vector).

### Chimeric Antigen Receptors and Car-T Cells

[0381] The disclosure provides immune cells modified using nucleobase editors described herein that express chimeric antigen receptors (CARs). Modification of immune cells to express a chimeric antigen receptor can enhance an immune cell's immunoreactive activity, wherein the chimeric antigen receptor has an affinity for an epitope on an antigen, wherein the antigen is associated with an altered fitness of an organism. For example, the chimeric antigen receptor can have an affinity for an epitope on a protein expressed in a target cell associated with graft versus host disease (GVHD). Because the CAR-T_{REG} cells can inhibit or prevent activation and/or proliferation of T_{CONV} near the CAR-T_{REG} cells when the CAR-T_{REG} cell are activated (e.g., through binding of the CAR to an antigen). In embodiments, the antigen is a human leukocyte antigen, such as HLA-A*02.

[0382] In embodiments, the CAR binds an antigen associated with a population of autoreactive T cells. In various instances, the antigen targeted by the CAR is associated with one or more diseases. Non-limiting examples of diseases include autoimmune diseases and alloimmune diseases, such as graft versus host disease (GVHD), acute GVHD, or chronic GVHD. In embodiments, the disease is any disease or disorder associated with an undesired immune activity or response. Further non-limiting examples of diseases include type I diabetes, multiple sclerosis, rheumatoid arthritis, amyotrophic lateral sclerosis (ALS), hemophilia, autoantibody-mediated autoimmune disease, asthma, systemic lupus erythematosus (SLE), Chrohn's disease, cutaneious lupus, and pemphigus.

[0383] Some embodiments comprise autologous immune cell immunotherapy, wherein immune cells are obtained from a subject having a disease or altered fitness characterized by an autoimmune or alloimmune response, such as graft versus host disease (GVHD). The obtained immune cells are genetically modified to express a chimeric antigen receptor and are effectively redirected against specific antigens. Thus, in some embodiments, immune cells are obtained from a subject in need of CAR-T_{REG} immunotherapy. In some embodiments, these autologous immune cells are cultured and modified shortly after they are obtained from the subject. In other embodiments, the autologous cells are obtained and then stored for future use. In allogeneic immune cell immunotherapy, immune cells can be obtained from a donor other than the subject who will be receiving treatment. In some embodiments, immune cells are obtained from a healthy subject or donor and are genetically modified to express a chimeric antigen receptor and are effectively redirected against specific antigens. The immune cells, after modification to express a chimeric antigen receptor, are administered to a subject for treating an autoimmune or alloimmune disorder (e.g., graft versus host disease). In some embodiments, immune cells to be modified to express a chimeric antigen receptor can be obtained from pre-existing stock cultures of immune cells.

[0384] Cells (e.g., immune cells, immune effector cells, pluripotent stem cells, etc.) can be isolated or purified from a sample collected from a subject or a donor using standard techniques known in the art (see, e.g., FIG. 1). In embodiments, the cell is a precursor to a T_{REG} cell (e.g., an induced pluripotent stem cell (iPSC) or an embryonic stem cell (ESC)) and/or is capable of differentiating into a T_{REG} cell. In some embodiments, the T_{REG} cell (or a T_{REG} cell equivalent) is obtained from an induced pluripotent stem cell. In some embodiments, the T_{REG} cell (or a T_{REG} cell equivalent) is obtained from a T_{REG} precursor cell (e.g., an induced pluripotent stem cell (iPSC) or an embryonic stem cell (ESC)). For example, immune effector cells can be isolated or purified from a whole blood sample by lysing red blood cells and removing peripheral mononuclear blood cells by centrifugation. The immune effector cells can be further isolated or purified using a selective purification method that isolates the immune effector cells based on cell-specific markers such as CD25, CD3, CD4, CD8, CD25, CD28, CD45RA, CD45RO, or CD127. In one embodiment, CD4⁺ is used as a marker to select T_{REG} cells. In one embodiment, CD25⁺ is used as a marker to select T_{REG} cells. In one embodiment, CD127⁻ is used as a marker to select T_{REG} cells. In one embodiment, CD4⁺, CD8⁺⁺, and CD127⁻ are used as a marker to select regulatory T_{REG} cells. In embodiments, T_{REG} cells and/or subpopulations thereof are selected using one or more of the following markers: CD3⁺, CD4⁺, CD5⁺, CD14⁻, CD19⁻, CD25/IL-2 R alpha⁺, CD39/ENTPD1⁺, 5′ Nucleotidase/CD73⁺, CD103/Integrin alpha E⁺, CD127⁺, CTLA-4⁺, Folate Receptor 4⁺, FoxP3⁺, LRRC32/GARP⁺, GITR⁺, IL-7 R alpha/CD127^{low}, Helios^{+/-}, LAG-3/CD223⁺, LAP⁺, Neuropilin-1/BDCA-4⁺, OX40/CD134⁺, L-Selectin/CD26L⁺, and STAT5Y. In some instances, a T_{REG} cell is selected using one or more markers selected from Galectin-1, TGF-beta, IL-10, and IL-35. In some cases, the T_{REG} cells are selected using one or more of the following markers: CD8, CD28, CD45RA, CD45RO, Qa-1, HLA-E, or any polypeptide targeted by and/or edited using the base editors and methods provided herein.

[0385] A technique for isolating or purifying immune effector cells is flow cytometry (see, e.g., FIG. 1). In fluorescence activated cell sorting a fluorescently labelled antibody with affinity for an immune effector cell marker is used to label immune effector cells in a sample. A gating strategy appropriate for the cells expressing the marker is used to segregate the cells. For example, T lymphocytes can be separated from other cells in a sample by using, for example, a fluorescently labeled antibody specific for an immune effector cell marker (e.g., CD4⁺CD8⁺⁺, and CD127⁺) and corresponding gating strategy. In one embodiment, a CD4 gating strategy is employed. In one embodiment, a CD8 gating strategy is employed. In one embodiment, a CD127 gating strategy is employed. In another embodiment, a CD4, CD8, and CD127 gating strategy is employed. In some embodiments, a gating strategy for other markers specific to an immune effector cell is employed instead of, or in combination with, the CD4, CD8, and/or CD127 gating strategy.

[0386] The immune effector cells contemplated in the disclosure are effector T cells. In some embodiments, the effector T cell is a naïve CD8+ T cell, a cytotoxic T cell, a natural killer T (NKT) cell, a natural killer (NK) cell, or a regulatory T (Treg) cell. In some embodiments, the effector T cells are thymocytes, immature T lymphocytes, mature T lymphocytes, resting T lymphocytes, or activated T lymphocytes. In some embodiments the immune effector cell is a CD4⁺ CD8+, and CD127⁻ T_{REG} cell. In some embodiments, the immune effector cell is any other subset of T cells. The modified immune effector cell may express, in addition to the chimeric antigen receptor, an exogenous cytokine, a different chimeric receptor, or any other agent that would enhance immune effector cell signaling or function. For example, co-expression of the chimeric antigen receptor and a cytokine may enhance the CAR-T_{REG} cell's ability to inhibit activity of an immune cell (e.g., a T_{CONV} cell).

[0387] Chimeric antigen receptors as contemplated in the present disclosure comprise an extracellular binding domain, a transmembrane domain, and an intracellular domain. Binding of an antigen to the extracellular binding domain can activate the CAR-T_{REG} cell and generate an effector response, which includes inhibition of T cell (e.g., T_{CONV} cells) proliferation, cytokine production, and other processes associated with T cell activation. In some embodiments of the present disclosure, the chimeric antigen receptor further comprises a linker. In some embodiments, the linker is a (GGGGS)ₙ linker (SEQ ID NO: 247). In some embodiments, a CAR of the present disclosure includes a leader peptide sequence (e.g., N-terminal to the antigen binding domain). An exemplary leader peptide amino acid sequence is:

(SEQ ID NO: 963)
METDTLLLWVLLLWVPGSTG.

[0388] In various embodiments, the CAR-T specifically targets a human leukocyte antigen (e.g., HLA-A*02).

[0389] Provided herein are also nucleic acids that encode the chimeric antigen receptors described herein. In some embodiments, the nucleic acid is isolated or purified. Delivery of the nucleic acids ex vivo can be accomplished using methods known in the art. For example, immune cells obtained from a subject may be transformed with a nucleic acid vector encoding the chimeric antigen receptor. The vector may then be used to transform recipient immune cells so that these cells will then express the chimeric antigen receptor. Efficient means of transforming immune cells include transfection and transduction. Such methods are well known in the art. For example, applicable methods for delivery the nucleic acid molecule encoding the chimeric antigen receptor (and the nucleic acid(s) encoding the base editor) can be found in International Application No. PCT/US2009/040040 and U.S. Pat. Nos. 8,450,112; 9,132,153; and 9,669,058, each of which is incorporated herein in its entirety. Additionally, those methods and vectors described herein for delivering the nucleic acid encoding the base editor are applicable to delivering the nucleic acid encoding the chimeric antigen receptor.

[0390] Some aspects of the present disclosure provide for immune cells comprising a chimeric antigen and an altered endogenous gene that enhances immune cell function, increases lineage stability, increases resistance to immunosuppression or inhibition, reduces activation and/or proliferation of T_{CONV} cells or a combination thereof. In some embodiments, the altered endogenous gene may be created by base editing. In some embodiments, the base editing may reduce or attenuate the gene expression. In some embodiments, the base editing may reduce or attenuate the gene activation. In some embodiments, the base editing may reduce or attenuate the functionality of the gene product. In some other embodiments, the base editing may activate or enhance the gene expression. In some embodiments, the base editing may increase the functionality of the gene product. In some embodiments, the altered endogenous gene may be modified or edited in an exon, an intron, an exon-intron injunction, or a regulatory element thereof. The modification may be edit to a single nucleobase in a gene or a regulatory element thereof. The modification may be in an exon, more than one exon, an intron, or more than one intron, or a combination thereof. The modification may be in an open reading frame of a gene. The modification may be in an untranslated region of the gene, for example, a 3′-UTR or a 5′-UTR. In some embodiments, the modification is in a regulatory element of an endogenous gene. In some embodiments, the modification is in a promoter, an enhancer, an operator, a silencer, an insulator, a terminator, a transcription initiation sequence, a translation initiation sequence (e.g., a Kozak sequence), or any combination thereof.

[0391] In some embodiments, the immune cell may comprise a chimeric antigen receptor (CAR) and one or more edited genes, one or more regulatory elements thereof, or combinations thereof, wherein expression of the edited gene is either knocked out or knocked down. In some embodiments, the CAR-T_{REG} cells have increased lineage stability and/or enhanced functionality (e.g., less activation of T_{CONV} cells and/or lower allorecognition) as compared to a similar reference CAR-T_{REG} cell not having the one or more edited genes as described herein. In some embodiments, the CAR-T_{REG} cells have reduced immunogenicity as compared to a similar reference CAR-T_{REG} cell not having the one or more edited genes as described herein. In some embodiments, the CAR-T_{REG} cells have increased T_{CONV} cell inhibition activity as compared to a similar reference CAR-T_{REG} cell not having the one or more edited genes as described herein.

[0392] The one or more genes may be edited by base editing or through use of a nuclease (e.g., a Cas12b). In some embodiments, at least one or more genes or regulatory elements thereof are modified in an immune cell with the base editing compositions and methods provided herein.

[0393] In some embodiments the one or more genes, or one or more regulatory elements thereof, or combinations thereof, may be selected from a group consisting of: BRINP1, JNK1, PRKCQ, CHIP, CD70, CD58, PD-1, SIRT1, and RNF20. In some embodiments, the one or more genes, or regulatory elements thereof, comprise a combination of targets including one or more of SIRT1 and RNF20, and one or more of PD-1, CD70, and CD58. In embodiments, the combination of targets further includes β2M (β2M). In some embodiments, the one or more genes comprise a combination of targets selected from the following: SIRT1, PD-1, CD70, and CD58; SIRT1, PD-1, and CD70; SIRT1, PD-1, and CD58; SIRT1, CD70, and CD58; SIRT1 and PD-1; SIRT1 and CD70; SIRT1 and CD58; SIRT1, PD-1, CD70, CD58, and B2M; SIRT1, PD-1, CD70, and B2M; SIRT1, PD-1, CD58 and B2M; SIRT1, CD70, CD58, and B2M; SIRT1, PD-1, and B2M; SIRT1, CD70, and B2M; SIRT1, CD58, and B2M; RNF20, PD-1, CD70, and CD58; RNF20, PD-1, and CD70; RNF20, PD-1, and CD58; RNF20, CD70, and CD58; RNF20 and PD-1; RNF20 and CD70; RNF20 and CD58; RNF20, PD-1, CD70, CD58, and B2M; RNF20, PD-1, CD70, and B2M; III RNF20, PD-1, CD58 and B2M; RNF20, CD70, CD58, and B2M; RNF20, PD-1, and B2M; RNF20, CD70, and B2M; RNF20, CD58, and B2M; SIRT1, RNF20, PD-1, CD70, and CD58; SIRT1, RNF20, PD-1, and CD70; SIRT1, RNF20, PD-1, and CD58; SIRT1, RNF20, CD70, and CD58; SIRT1, RNF20, and PD-1; SIRT1, RNF20, and CD70; SIRT1, RNF20, and CD58; SIRT1, RNF20, PD-1, CD70, CD58, and B2M; SIRT1, RNF20, PD-1, CD70, and B2M; SIRT1, RNF20, PD-1, CD58, and B2M; SIRT1, RNF20, CD70, CD58, and B2M; SIRT1, RNF20, PD-1, and B2M; SIRT1, RNF20, CD70, and B2M; and SIRT1, RNF20, CD58, and B2M.

[0394] In some embodiments, the at least one or more genes or regulatory elements thereof include one or more genes, or one or more regulatory elements thereof, or combinations thereof including those described in PCT/US20/13964, PCT/US20/52822, PCT/US20/18178, and/or PCT/US21/52035.

[0395] In some embodiments, an immune cell comprises a chimeric antigen receptor and one or more edited genes, a regulatory element thereof, or combinations thereof. An edited gene may be an immune response regulation gene (e.g., coding for an immune response regulation peptide), an immunogenic gene, a checkpoint inhibitor gene, a gene involved in immune responses, a gene affecting lineage stabilization (e.g., SIRT1 and/or RNF20), a cell surface marker e.g., a T_{REG} cell surface protein (e.g., PD-1, CD70, or CD58), or any combination thereof. In some embodiments, an immune cell comprises a chimeric antigen receptor and an edited gene that is associated with activated T cell proliferation, alpha-beta T cell activation, gamma-delta T cell activation, positive regulation of T cell proliferation, negative regulation of T-helper cell proliferation or differentiation, or their regulatory elements thereof, or combinations thereof.

[0396] In some embodiments, provided herein is an immune cell with an edited B2M gene, such that the immune cell does not express an endogenous functional Beta-2-microglobulin.

[0397] In some embodiments, provided herein is a CAR-T_{REG} cell with an edited B2Mgene, such that the CAR-T_{REG} cell exhibits reduced or negligible expression or no expression of endogenous Beta-2-microglobulin. In embodiments, the reduced expression is about, or less than about 0.001%, 0.01%, 0.1%, 1%, 2%, 3%, 4%, 5%, 10%, 15%, 20%, 25%, 30%, 35%, 40%, 45%, 50%, 55%, 60%, 65%, 70%, 75%, 80%, 85%, 90%, or 95% of that relative to that in a reference cell. In embodiments, the reduced expression greater than about 0.001%, 0.01%, 0.1%, 1%, 2%, 3%, 4%, 5%, 10%, 15%, 20%, 25%, 30%, 35%, 40%, 45%, 50%, 55%, 60%, 65%, 70%, 75%, 80%, 85%, 90%, or 95% of that relative to that in a reference cell.

[0398] In some embodiments, provided herein is an immune cell with an edited BRINP1 gene, such that the immune cell does not express an endogenous functional BRINP1. In some embodiments, provided herein is a CAR-T_{REG} cell with an edited BRINP1 gene, such that the CAR-T_{REG} cell exhibits reduced or negligible expression or no expression of endogenous BRINP1. In embodiments, the reduced expression is about, or less than about 0.001%, 0.01%, 0.1%, 1%, 2%, 3%, 4%, 5%, 10%, 15%, 20%, 25%, 30%, 35%, 40%, 45%, 50%, 55%, 60%, 65%, 70%, 75%, 80%, 85%, 90%, or 95% of that relative to that in a reference cell. In embodiments, the reduced expression greater than about 0.001%, 0.01%, 0.1%, 1%, 2%, 3%, 4%, 5%, 10%, 15%, 20%, 25%, 30%, 35%, 40%, 45%, 50%, 55%, 60%, 65%, 70%, 75%, 80%, 85%, 90%, or 95% of that relative to that in a reference cell.

[0399] In some embodiments, provided herein is an immune cell with an edited JNK1 gene, such that the immune cell does not express an endogenous functional JNK1. In some embodiments, provided herein is a CAR-T_{REG} cell with an edited JNK1 gene, such that the CAR-T_{REG} cell exhibits reduced or negligible expression or no expression of endogenous JNK1. In embodiments, the reduced expression is about, or less than about 0.001%, 0.01%, 0.1%, 1%, 2%, 3%, 4%, 5%, 10, 1%, 20%, 25%, 30%, 35%, 40%, 45%, 50%, 55%, 60%, 65%, 70%, 75%, 80%, 85%, 90%, or 95% of that relative to that in a reference cell. In embodiments, the reduced expression greater than about 0.001%, 0.01%, 0.1%, 1%, 2%, 3%, 4%, 5%, 10%, 15%, 20%, 25%, 30%, 35%, 40%, 45%, 50%, 55%, 60%, 65%, 70%, 75%, 80%, 85%, 90%, or 95% of that relative to that in a reference cell.

[0400] In some embodiments, provided herein is an immune cell with an edited PRKCQ gene, such that the immune cell does not express an endogenous functional PRKCQ. In some embodiments, provided herein is a CAR-T_{REG} cell with an edited PRKCQ gene, such that the CAR-T_{REG} cell exhibits reduced or negligible expression or no expression of endogenous PRKCQ. In embodiments, the reduced expression is about, or less than about 0.001%, 0.01%, 0.1%, 1%, 2%, 3%, 4% 5%, 10, 15%, 20%, 25%, 30%, 35%, 40%, 45%, 50%, 55%, 60%, 65%, 70%, 75%, 80%, 85%, 90%, or 95% of that relative to that in a reference cell. In embodiments, the reduced expression greater than about 0.001%, 0.01%, 0.1%, 1%, 2%, 3%, 4%, 5%, 10%, 15%, 20%, 25%, 30%, 35%, 40%, 45%, 50%, 55%, 60%, 65%, 70%, 75%, 80%, 85%, 90%, or 95% of that relative to that in a reference cell.

[0401] In some embodiments, provided herein is an immune cell with an edited CHIP gene, such that the immune cell does not express an endogenous functional CHIP. In some embodiments, provided herein is a CAR-T_{REG} cell with an edited CHIP gene, such that the CAR-T_{REG} cell exhibits reduced or negligible expression or no expression of endogenous CHIP. In embodiments, the reduced expression is about, or less than about 0.001%, 0.01%, 0.1%, 1%, 2%, 3%, 4%, 5%, 1%, 15%, 20%, 25%, 30%, 35%, 40%, 45%, 50%, 55%, 60%, 65%, 70%, 75%, 80%, 85%, 90%, or 95% of that relative to that in a reference cell. In embodiments, the reduced expression greater than about 0.001%, 0.01%, 0.1%, 1%, 2%, 3%, 4%, 5%, 10%, 15%, 20%, 25%, 30%, 35%, 40%, 45%, 50%, 55%, 60%, 65%, 70%, 75%, 80%, 85%, 90%, or 95% of that relative to that in a reference cell.

[0402] In some embodiments, provided herein is an immune cell with an edited CD58 gene, such that the immune cell does not express an endogenous functional CD58. In some embodiments, provided herein is a CAR-T_{REG} cell with an edited CD58 gene, such that the CAR-T_{REG} cell exhibits reduced or negligible expression or no expression of endogenous CD58. In embodiments, the reduced expression is about, or less than about 0.001%, 0.01%, 0.1%, 1%, 2%, 3%, 4%, 5%, 10%, 15%, 20%, 25%, 30%, 35%, 40%, 45%, 50%, 55%, 60%, 65%, 70%, 75%, 80%, 85%, 90%, or 95% of that relative to that in a reference cell. In embodiments, the reduced expression greater than about 0.001%, 0.01%, 0.1%, 1%, 2%, 3%, 4%, 5%, 10%, 15%, 20%, 25%, 30%, 35%, 40%, 45%, 50%, 55%, 60%, 65%, 70%, 75%, 80%, 85%, 90%, or 95% of that relative to that in a reference cell.

[0403] In some embodiments, provided herein is an immune cell with an edited PD-1 gene, such that the immune cell does not express an endogenous functional PD-1. In some embodiments, provided herein is a CAR-T_{REG} cell with an edited PD-1 gene, such that the CAR-T_{REG} cell exhibits reduced or negligible expression or no expression of endogenous PD-1. In embodiments, the reduced expression is about, or less than about 0.001%, 0.01%, 0.1%, 1%, 2%, 3%, 4%, 5%, 10%, 15%, 20%, 25%, 30%, 35%, 40%, 45%, 50%, 55%, 60%, 65%, 70%, 75%, 80%, 85%, 90%, or 95% of that relative to that in a reference cell. In embodiments, the reduced expression greater than about 0.001%, 0.01%, 0.1%, 1%, 2%, 3%, 4%, 5%, 10%, 15%, 20%, 25%, 30%, 35%, 40%, 45%, 50%, 55%, 60%, 65%, 70%, 75%, 80%, 85%, 90%, or 95% of that relative to that in a reference cell.

[0404] In some embodiments, provided herein is an immune cell with an edited SIRT1 gene, such that the immune cell does not express an endogenous functional SIRT1. In some embodiments, provided herein is a CAR-T_{REG} cell with an edited SIRT1 gene, such that the CAR-T_{REG} cell exhibits reduced or negligible expression or no expression of endogenous SIRT1. In embodiments, the reduced expression is about, or less than about 0.001%, 0.01%, 0.1%, 1%, 2%, 3%, 4%, 5%, 10%, 15%, 20%, 25%, 30%, 35%, 40%, 45%, 50%, 55%, 60%, 65%, 70%, 75%, 80%, 85%, 90%, or 95% of that relative to that in a reference cell. In embodiments, the reduced expression greater than about 0.001%, 0.01%, 0.1%, 1%, 2%, 3%, 4%, 5%, 10%, 15%, 20%, 25%, 30%, 35%, 40%, 45%, 50%, 55%, 60%, 65%, 70%, 75%, 80%, 85%, 90%, or 95% of that relative to that in a reference cell.

[0405] In some embodiments, provided herein is an immune cell with an edited RNF20 gene, such that the immune cell does not express an endogenous functional RNF20. In some embodiments, provided herein is a CAR-T_{REG} cell with an edited RNF20 gene, such that the CAR-T_{REG} cell exhibits reduced or negligible expression or no expression of endogenous RNF20. In embodiments, the reduced expression is about, or less than about 0.001%, 0.01%, 0.1%, 1%, 2%, 3%, 4%, 5%, 10, 1%, 20%, 25%, 30%, 35%, 40%, 45%, 50%, 55%, 60%, 65%, 70%, 75%, 80%, 85%, 90%, or 95% of that relative to that in a reference cell. In embodiments, the reduced expression greater than about 0.001%, 0.01%, 0.1%, 1%, 2%, 3%, 4%, 5%, 10%, 15%, 20%, 25%, 30%, 35%, 40%, 45%, 50%, 55%, 60%, 65%, 70%, 75%, 80%, 85%, 90%, or 95% of that relative to that in a reference cell.

[0406] In some embodiments, each edited gene may comprise a single base edit, an insertion, and/or a deletion. In some embodiments, each edited gene may comprise multiple base edits at different regions of the gene. In some embodiments, a single modification event (such as electroporation), may introduce one or more gene edits. In some embodiments at least one, two, three, four, five, six, seven, eight, nine, ten, eleven, twelve, thirteen, fourteen, fifteen, sixteen, seventeen, eighteen, nineteen, twenty or more edits may be introduced in one or more genes simultaneously. In some embodiments, an immune cell, including but not limited to any immune cell comprising an edited gene selected from any of the aforementioned gene edits, can be edited to generate mutations in other genes that enhance the CAR-T_{REG}'s function and/or lineage stability.

### Extracellular Binding Domain

[0407] The chimeric antigen receptors of the disclosure include an extracellular binding domain. The extracellular binding domain of a chimeric antigen receptor contemplated herein comprises an amino acid sequence of an antibody, or an antigen binding fragment thereof, that has an affinity for a specific antigen. In some embodiments, the antigen is HLA-A*02.

[0408] In some embodiments the chimeric antigen receptor comprises an amino acid sequence of an antibody. In some embodiments, the chimeric antigen receptor comprises the amino acid sequence of an antigen binding fragment of an antibody. The antibody (or fragment thereof) portion of the extracellular binding domain recognizes and binds to an epitope of an antigen. In some embodiments, the antibody fragment portion of a chimeric antigen receptor is a single chain variable fragment (scFv). An scFv comprises the light and variable fragments of a monoclonal antibody. In other embodiments, the antibody fragment portion of a chimeric antigen receptor is a multichain variable fragment, which comprises more than one extracellular binding domains and therefore bind to more than one antigen simultaneously. In a multiple chain variable fragment embodiment, a hinge region may separate the different variable fragments, providing necessary spatial arrangement and flexibility.

[0409] In other embodiments, the antibody portion of a chimeric antigen receptor comprises at least one heavy chain and at least one light chain. In some embodiments, the antibody portion of a chimeric antigen receptor comprises two heavy chains, joined by disulfide bridges and two light chains, wherein the light chains are each joined to one of the heavy chains by disulfide bridges. In some embodiments, the light chain comprises a constant region and a variable region. Complementarity determining regions residing in the variable region of an antibody are responsible for the antibody's affinity for a particular antigen. Thus, antibodies that recognize different antigens comprise different complementarity determining regions. Complementarity determining regions reside in the variable domains of the extracellular binding domain, and variable domains (i.e., the variable heavy and variable light) can be linked with a linker or, in some embodiments, with disulfide bridges. In some embodiments, the variable heavy chain and variable light chain are linked by a (GGGGS)ₙ linker (SEQ ID NO: 247), wherein the n is an integer from 1 to 10.

[0410] In some embodiments, the antigen recognized and bound by the extracellular domain is a protein or peptide, a nucleic acid, a lipid, or a polysaccharide. Antigens can be heterologous, such as those expressed in a pathogenic bacteria or virus. Antigens can also be synthetic; for example, some individuals have extreme allergies to synthetic latex and exposure to this antigen can result in an extreme immune reaction. In some embodiments, the antigen is autologous, and is expressed on a diseased or otherwise altered cell.

[0411] For example, in some embodiments, the antigen (e.g., HLA-A*02) is expressed in an autologous or allogenic cell.

[0412] Antibody-antigen interactions are noncovalent interactions resulting from hydrogen bonding, electrostatic or hydrophobic interactions, or from van der Waals forces. The affinity of extracellular binding domain of the chimeric antigen receptor for an antigen can be calculated with the following formula:

K_{A}=[Antibody−Antigen]/[Antibody][Antigen], wherein
[0413] [Ab]=molar concentration of unoccupied binding sites on the antibody;
[0414] [Ag]=molar concentration of unoccupied binding sites on the antigen; and
[0415] [Ab-Ag]=molar concentration of the antibody-antigen complex.

[0416] The antibody-antigen interaction can also be characterized based on the dissociation of the antigen from the antibody. The dissociation constant (K_{D}) is the ratio of the association rate to the dissociation rate and is inversely proportional to the affinity constant. Thus, K_{D}=1/K_{A}. Those skilled in the art will be familiar with these concepts and will know that traditional methods, such as ELISA assays, can be used to calculate these constants.

### Transmembrane Domain

[0417] The chimeric antigen receptors of the disclosure include a transmembrane domain. The transmembrane domain of the chimeric antigen receptors described herein spans the CAR-T_{REG} cell's lipid bilayer cellular membrane and separates the extracellular binding domain and the intracellular signaling domain. In some embodiments, this domain is derived from other receptors having a transmembrane domain, while in other embodiments, this domain is synthetic. In some embodiments, the transmembrane domain may be derived from a non-human transmembrane domain and, in some embodiments, humanized. By “humanized” is meant having the sequence of the nucleic acid encoding the transmembrane domain optimized such that it is more reliably or efficiently expressed in a human subject. In some embodiments, the transmembrane domain is derived from another transmembrane protein expressed in a human immune effector cell. Examples of such proteins include, but are not limited to, subunits of the T cell receptor (TCR) complex, PD-1, or any of the Cluster of Differentiation proteins, or other proteins, that are expressed in the immune effector cell and that have a transmembrane domain. In some embodiments, the transmembrane domain will be synthetic, and such sequences will comprise many hydrophobic residues.

[0418] Transmembrane domains for use in the disclosed CARs can include at least the transmembrane region(s) of) the alpha, beta, or zeta chain of the T-cell receptor, CD28, CD3 epsilon, CD45, CD4, CD5, CD8, CD9, CD16, CD22, CD33, CD37, CD64, CD80, CD86, CD134, CD137, CD154. In some embodiments, the transmembrane domain is derived from CD4, CD8a, CD28, and CD3ζ.

[0419] The chimeric antigen receptor is designed, in some embodiments, to comprise a spacer between the transmembrane domain and the extracellular domain, the intracellular domain, or both. Such spacers can be 1, 2, 3, 4, 5, 6, 7, 8, 9, 10, 11, 12, 13, 14, 15, 16, 17, 18, 19, or 20 amino acids in length. In some embodiments, the spacer can be 20, 30, 40, 50, 60, 70, 80, 90, or 100 amino acids in length. In still other embodiments the spacer can be between 100 and 500 amino acids in length. The spacer can be any polypeptide that links one domain to another and are used to position such linked domains to enhance or optimize chimeric antigen receptor function.

### Intracellular Signaling Domain

[0420] The chimeric antigen receptors of the disclosure include an intracellular signaling domain. The intracellular signaling domain is the intracellular portion of a protein expressed in a T_{REG} cell that transduces a T_{REG} cell effector function signal (e.g., an activation signal) and directs the T_{REG} cell to perform a specialized function. T_{REG} cell activation can be induced by a number of factors, including binding of cognate antigen to the T cell receptor on the surface of T cells and binding of cognate ligand to costimulatory molecules on the surface of the T_{REG} cell. A T_{REG} cell co-stimulatory molecule is a cognate binding partner on a T_{REG} cell that specifically binds with a co-stimulatory ligand, thereby mediating a co-stimulatory response by the T_{REG} cell, such as, but not limited to, proliferation. Co-stimulatory molecules include but are not limited to an MHC class I molecule. Activation of a T_{REG} cell leads to immune response, such as T_{REG} cell proliferation and differentiation (see, e.g., Smith-Garvin et al., Annu. Rev. Immunol., 27:591-619, 2009). Exemplary T_{REG} cell signaling domains are known in the art. Non-limiting examples include the CD3ζ, CD8, CD28, CD27, CD154, GITR (TNFRSF18), CD134 (OX40), and CD137 (4-1BB) signaling domains.

[0421] The intracellular signaling domain of the chimeric antigen receptor contemplated herein comprises a primary signaling domain. In some embodiments, the chimeric antigen receptor comprises the primary signaling domain and a secondary, or co-stimulatory, signaling domain.

[0422] In some embodiments, the primary signaling domain comprises one or more immunoreceptor tyrosine-based activation motifs, or ITAMs. In some embodiments, the primary signaling domain comprises more than one ITAM. ITAMs incorporated into the chimeric antigen receptor may be derived from ITAMs from other cellular receptors. In some embodiments, the primary signaling domain comprising an ITAM may be derived from subunits of the TCR complex, such as CD3γ, CD3ε, CD3ζ, or CD3δ. In some embodiments, the primary signaling domain comprising an ITAM may be derived from FcRγ, FcRβ, CD5, CD22, CD79a, CD79b, or CD66d.

[0423] In some embodiments, the primary signaling domain is selected from the group consisting of CD8, CD28, CD134 (OX40), CD137 (4-1BB), and CD3ζ.

[0424] In some embodiments, the secondary, or co-stimulatory, signaling domain is derived from CD2, CD4, CDS, CD8α, CD28, CD83, CD134, CD137 (4-1BB), ICOS, or CD154, or a combination thereof.

### Editing of Target Genes in Immune Cells

[0425] In some embodiments, provided herein is an immune cell with at least one modification in an endogenous gene or regulatory elements thereof. In one embodiment, the modification enhances the persistence of a T_{REG}, enhances the function of a T_{REG}, and/or enhances the lineage stability of a T_{REG}. In some embodiments, the immune cell may comprise a further modification in at least one, two, three, four, five, six, seven, eight, nine, ten, eleven, twelve, thirteen, fourteen, fifteen, sixteen, seventeen, eighteen, nineteen, twenty or more endogenous genes or regulatory elements thereof. In some embodiments, the at least one modification is a single nucleobase modification. In some embodiments, the at least one modification is by base editing. In some instances, the at least one modification is an insertion or deletion carried out using a nuclease (e.g., Cas12b). The base editing may be positioned at any suitable position of the gene, or in a regulatory element of the gene. Thus, it may be appreciated that a single base editing at a start codon, for example, can completely abolish the expression of the gene. In some embodiments, the base editing may be performed at a site within an exon. In some embodiments, the base editing may be performed at a site on more than one exon. In some embodiments, the base editing may be performed at any exon of the multiple exons in a gene. In some embodiments, base editing may introduce a premature STOP codon into an exon, resulting in either lack of a translated product or in a truncated that may be misfolded and thereby eliminated by degradation, or may produce an unstable mRNA that is readily degraded. In some embodiments, the immune cell is a T_{REG} cell. In some embodiments, the immune cell is a CAR-T_{REG} cell.

[0426] In some embodiments, an edited gene may be an immune response regulation gene (e.g., coding for an immune response regulation peptide), may be an immune response regulation gene, an immunogenic gene, a checkpoint inhibitor gene, a gene involved in immune responses, a gene affecting lineage stabilization (e.g., SIRT1 and/or RNF20), a cell surface marker e.g., a T_{REG} cell surface protein (e.g., PD-1, CD70, or CD58), or any combination thereof. In some embodiments, the edited gene is associated with activated T cell proliferation, alpha-beta T cell activation, gamma-delta T cell activation, positive regulation of T cell proliferation, negative regulation of T-helper cell proliferation or differentiation, or their regulatory elements thereof, or combinations thereof.

[0427] In some embodiments the edited gene is selected from a group consisting of: BRINP1, JNK1, PRKCQ, CHIP, CD70, CD58, PD-1, SIRT1, and RNF20. In some embodiments, a combination of genes is edited that comprises one or more of SIRT1 and RNF20, one or more of PD-1, CD70, and CD58, and/or β2M (B2M). In some embodiments, one or more of the following combinations of genes is edited: SIRT1, PD-1, CD70, and CD58; SIRT1, PD-1, and CD70; SIRT1, PD-1, and CD58; SIRT1, CD70, and CD58; SIRT1 and PD-1; SIRT1 and CD70; SIRT1 and CD58; SIRT1, PD-1, CD70, CD58, and B2M; SIRT1, PD-1, CD70, and B2M; SIRT1, PD-1, CD58 and B2M; SIRT1, CD70, CD58, and B2M; SIRT1, PD-1, and B2M; SIRT1, CD70, and B2M; SIRT1, CD58, and B2M; RNF20, PD-1, CD70, and CD58; RNF20, PD-1, and CD70; RNF20, PD-1, and CD58; RNF20, CD70, and CD58; RNF20 and PD-1; RNF20 and CD70; RNF20 and CD58; RNF20, PD-1, CD70, CD58, and B2M; RNF20, PD-1, CD70, and B2M; RNF20, PD-1, CD58 and B2M; RNF20, CD70, CD58, and B2M; RNF20, PD-1, and B2M; RNF20, CD70, and B2M; RNF20, CD58, and B2M; SIRT1, RNF20, PD-1, CD70, and CD58; SIRT1, RNF20, PD-1, and CD70; SIRT1, RNF20, PD-1, and CD58; SIRT1, RNF20, CD70, and CD58; SIRT1, RNF20, and PD-1; SIRT1, RNF20, and CD70; SIRT1, RNF20, and CD58; SIRT1, RNF20, PD-1, CD70, CD58, and B2M; SIRT1, RNF20, PD-1, CD70, and B2M; SIRT1, RNF20, PD-1, CD58, and B2M; SIRT1, RNF20, CD70, CD58, and B2M; SIRT1, RNF20, PD-1, and B2M; SIRT1, RNF20, CD70, and B2M; and SIRT1, RNF20, CD58, and B2M.

[0428] In some embodiments, the editing of the endogenous gene reduces expression of the gene. In some embodiments, the editing of the endogenous gene reduces expression of the gene by at least 50% as compared to a control cell without the modification. In some embodiments, the editing of the endogenous gene reduces expression of the gene by at least 60% as compared to a control cell without the modification. In some embodiments, the editing of the endogenous gene reduces expression of the gene by at least 70% as compared to a control cell without the modification. In some embodiments, the editing of the endogenous gene reduces expression of the gene by at least 80% as compared to a control cell without the modification. In some embodiments, the editing of the endogenous gene reduces expression of the gene by at least 90% as compared to a control cell without the modification. In some embodiments, the editing of the endogenous gene reduces expression of the gene by at least 100% as compared to a control cell without the modification. In some embodiments, the editing of the endogenous gene eliminates gene expression.

[0429] In some embodiments, base editing may be performed on an intron. For example, base editing may be performed on an intron. In some embodiments, the base editing may be performed at a site within an intron. In some embodiments, the base editing may be performed at a site one or more introns. In some embodiments, the base editing may be performed at any exon of the multiple introns in a gene. In some embodiments, one or more base editing may be performed on an exon, an intron or any combination of exons and introns.

[0430] In some embodiments, the modification or base edit may be within a promoter site. In some embodiments, the base edit may be introduced within an alternative promoter site. In some embodiments, the base edit may be in a 5′ regulatory element, such as an enhancer. In some embodiment, base editing may be introduced to disrupt the binding site of a nucleic acid binding protein. Exemplary nucleic acid binding proteins may be a polymerase, nuclease, gyrase, topoisomerase, methylase or methyl transferase, transcription factors, enhancer, PABP, zinc finger proteins, among many others.

[0431] In some embodiments, base editing may be used for splice disruption to silence target protein expression. In some embodiments, base editing may generate a splice acceptor-splice donor (SA-SD) site. Targeted base editing generating a SA-SD, or at a SA-SD site can result in reduced expression of a gene. In some embodiments, base editors (e.g., ABE, CBE) are used to target dinucleotide motifs that constitute splice acceptor and splice donor sites, which are the first and last two nucleotides of each intron. In some embodiments, splice disruption is achieved with an adenosine base editor (ABE). In some embodiments, splice disruption is achieved with a cytidine base editor (CBE). In some embodiments, base editors (e.g., ABE, CBE) are used to edit exons by creating STOP codons.

[0432] In some embodiments, provided herein is an immune cell with at least one modification in one or more endogenous genes. In some embodiments, the immune cell may have at least one modification in one, two, three, four, five, six, seven, eight, nine, ten, eleven, twelve, thirteen, fourteen, fifteen, sixteen, seventeen, eighteen, nineteen, twenty or more endogenous genes. In some embodiments, the modification generates a premature stop codon in the endogenous genes. In some embodiments, the STOP codon silences target protein expression. In some embodiments, the modification is a single base modification. In some embodiments, the modification is generated by base editing. The premature stop codon may be generated in an exon, an intron, or an untranslated region. In some embodiments, base editing may be used to introduce more than one STOP codon, in one or more alternative reading frames. In some embodiments, the stop codon is generated by an adenosine base editor (ABE). In some embodiments, the stop codon is generated by a cytidine base editor (CBE). In some embodiments, the CBE generates any one of the following edits (shown in underlined font) to generate a STOP codon: CAG→TAG; CAA→TAA; CGA→TGA; TGG→TGA: TGG→TAG: or TGG→TAA.

[0433] In some embodiments, modification/base edits may be introduced at a 3′-UTR, for example, in a poly adenylation (poly-A) site. In some embodiments, base editing may be performed on a 5′-UTR region.

### Delivery Systems

### Nucleic Acid-Based Delivery of Base Editor Systems

[0434] Nucleic acid molecules encoding a base editor system according to the present disclosure can be administered to subjects or delivered into cells in vitro or in vivo by art-known methods or as described herein. For example, a base editor system comprising a deaminase (e.g., cytidine or adenine deaminase) can be delivered by vectors (e.g., viral or non-viral vectors), or by naked DNA, DNA complexes, lipid nanoparticles, or a combination of the aforementioned compositions. A base editor system may be delivered to a cell using any methods available in the art including, but not limited to, physical methods (e.g., electroporation, particle gun, calcium phosphate transfection), viral methods, non-viral methods (e.g., liposomes, cationic methods, lipid nanoparticles, polymeric nanoparticles), or biological non-viral methods (e.g., attenuated bacterial, engineered bacteriophages, mammalian virus-like particles, biological liposomes, erythrocyte ghosts, exosomes).

[0435] Nanoparticles, which can be organic or inorganic, are useful for delivering a base editor system or component thereof. Nanoparticles are well known in the art and any suitable nanoparticle can be used to deliver a base editor system or component thereof, or a nucleic acid molecule encoding such components. In one example, organic (e.g., lipid and/or polymer) nanoparticles are suitable for use as delivery vehicles in certain embodiments of this disclosure. Non-limiting examples of lipid nanoparticles suitable for use in the methods of the present disclosure include those described in International Patent Application Publications No. WO2022140239, WO2022140252, WO2022140238, WO2022159421, WO2022159472, WO2022159475, WO2022159463, WO2021113365, and WO2021141969, the disclosures of each of which is incorporated herein by reference in its entirety for all purposes.

### Viral Vectors

[0436] A base editor described herein can be delivered with a viral vector. In some embodiments, a base editor disclosed herein can be encoded on a nucleic acid that is contained in a viral vector. In some embodiments, one or more components of the base editor system can be encoded on one or more viral vectors.

[0437] Viral vectors can include lentivirus (e.g., HIV and FIV-based vectors), Adenovirus (e.g., AD100), Retrovirus (e.g., Maloney murine leukemia virus, MML-V), herpesvirus vectors (e.g., HSV-2), and Adeno-associated viruses (AAVs), or other plasmid or viral vector types, in particular, using formulations and doses from, for example, U.S. Pat. No. 8,454,972 (formulations, doses for adenovirus), U.S. Pat. No. 8,404,658 (formulations, doses for AAV) and U.S. Pat. No. 5,846,946 (formulations, doses for DNA plasmids) and from clinical trials and publications regarding the clinical trials involving lentivirus, AAV and adenovirus.

### Non-Viral Platforms for Gene Transfer

[0438] Non-viral platforms for introducing a heterologous polynucleotide into a cell of interest are known in the art.

[0439] For example, the disclosure provides a method of inserting a heterologous polynucleotide into the genome of a cell using a Cas9 or Cas12 (e.g., Cas12b) ribonucleoprotein complex (RNP)-DNA template complex where an RNP including a Cas9 or Cas12 nuclease domain and a guide RNA, wherein the guide RNA specifically hybridizes to a target region of the genome of the cell, and wherein the Cas nuclease domain cleaves the target region to create an insertion site in the genome of the cell. A DNA template is then used to introduce a heterologous polynucleotide. In embodiments, the DNA template is a double-stranded or single-stranded DNA template, wherein the size of the DNA template is about 200 nucleotides or is greater than about 200 nucleotides, wherein the 5′ and 3′ ends of the DNA template comprise nucleotide sequences that are homologous to genomic sequences flanking the insertion site. In some embodiments, the DNA template is a single-stranded circular DNA template. In embodiments, the molar ratio of RNP to DNA template in the complex is from about 3:1 to about 100:1.

[0440] In some embodiments, the DNA template is a linear DNA template. In some examples, the DNA template is a single-stranded DNA template. In certain embodiments, the single-stranded DNA template is a pure single-stranded DNA template. In some embodiments, the single stranded DNA template is a single-stranded oligodeoxynucleotide (ssODN).

[0441] In other embodiments, a single-stranded DNA (ssDNA) can produce efficient HDR with minimal off-target integration. In one embodiment, an ssDNA phage is used to efficiently and inexpensively produce long circular ssDNA (cssDNA) donors. These cssDNA donors serve as efficient HDR templates when used with Cas9 or Cas12 (e.g., Cas12a, Cas12b), with integration frequencies superior to linear ssDNA (QssDNA) donors.

### Pharmaceutical Compositions

[0442] In some aspects, the present disclosure provides a pharmaceutical composition comprising any of the cells, polynucleotides, vectors, base editors, base editor systems, guide polynucleotides, fusion proteins, complexes, or the fusion protein-guide polynucleotide complexes described herein. In embodiments, a pharmaceutical composition of the disclosure comprises a modified T_{REG} that has a lower level of, lacks, or has virtually undetectable levels of one or more of the following polypeptides: bone morphogenetic protein/retinoic acid-inducible neural-specific protein 1 (BRINP1), C terminus of HSC70-interacting protein (CHIP), Cluster of Differentiation 70, c-JUN kinase 1 (JNK1), protein kinase C theta (PRKCQ), ring finger protein 20 (RNF20), and sirtuin 1 (SIRT1).

[0443] The pharmaceutical compositions of the present disclosure can be prepared in accordance with known techniques. See, e.g., Remington, The Science And Practice of Pharmacy (21st ed. 2005). In general, the cell, or population thereof is admixed with a suitable carrier prior to administration or storage, and in some embodiments, the pharmaceutical composition further comprises a pharmaceutically acceptable carrier. Suitable pharmaceutically acceptable carriers generally comprise inert substances that aid in administering the pharmaceutical composition to a subject, aid in processing the pharmaceutical compositions into deliverable preparations, or aid in storing the pharmaceutical composition prior to administration. Pharmaceutically acceptable carriers can include agents that can stabilize, optimize or otherwise alter the form, consistency, viscosity, pH, pharmacokinetics, solubility of the formulation. Such agents include buffering agents, wetting agents, emulsifying agents, diluents, encapsulating agents, and skin penetration enhancers. For example, carriers can include, but are not limited to, saline, buffered saline, dextrose, arginine, sucrose, water, glycerol, ethanol, sorbitol, dextran, sodium carboxymethyl cellulose, and combinations thereof.

[0444] The pharmaceutical compositions of the present disclosure can be prepared in accordance with known techniques. See, e.g., Remington, The Science And Practice of Pharmacy (21st ed. 2005). In general, the cell, or population thereof is admixed with a suitable carrier prior to administration or storage, and in some embodiments, the pharmaceutical composition further comprises a pharmaceutically acceptable carrier. Suitable pharmaceutically acceptable carriers generally comprise inert substances that aid in administering the pharmaceutical composition to a subject, aid in processing the pharmaceutical compositions into deliverable preparations, or aid in storing the pharmaceutical composition prior to administration. Pharmaceutically acceptable carriers can include agents that can stabilize, optimize or otherwise alter the form, consistency, viscosity, pH, pharmacokinetics, solubility of the formulation. Such agents include buffering agents, wetting agents, emulsifying agents, diluents, encapsulating agents, and skin penetration enhancers. For example, carriers can include, but are not limited to, saline, buffered saline, dextrose, arginine, sucrose, water, glycerol, ethanol, sorbitol, dextran, sodium carboxymethyl cellulose, and combinations thereof.

[0445] In some embodiments, the pharmaceutical composition is formulated for delivery to a subject. Suitable routes of administrating the pharmaceutical composition described herein include, without limitation: topical, subcutaneous, transdermal, intradermal, intralesional, intraarticular, intraperitoneal, intravesical, transmucosal, gingival, intradental, intracochlear, transtympanic, intraorgan, epidural, intrathecal, intramuscular, intravenous, intravascular, intraosseus, periocular, intratumoral, intracerebral, and intracerebroventricular administration.

[0446] In some embodiments, the pharmaceutical composition described herein is administered locally to a diseased site (e.g., a site of a graft versus host disease). In some embodiments, the pharmaceutical composition described herein is administered to a subject by injection, by means of a catheter, by means of a suppository, or by means of an implant, the implant being of a porous, non-porous, or gelatinous material, including a membrane, such as a sialastic membrane, or a fiber.

[0447] In some embodiments, any of the fusion proteins, gRNAs, and/or complexes described herein are provided as part of a pharmaceutical composition. In some embodiments, the pharmaceutical composition comprises any of the fusion proteins or complexes provided herein. In some embodiments pharmaceutical composition comprises a gRNA, a nucleic acid programmable DNA binding protein, a cationic lipid, and a pharmaceutically acceptable excipient. In embodiments, pharmaceutical compositions comprise a lipid nanoparticle and a pharmaceutically acceptable excipient. In embodiments, the lipid nanoparticle contains a gRNA, a base editor, a complex, a base editor system, or a component thereof of the present disclosure, and/or one or more polynucleotides encoding the same. Pharmaceutical compositions can optionally comprise one or more additional therapeutically active substances.

[0448] The compositions, as described above, can be administered in effective amounts. The effective amount will depend upon the mode of administration, the particular condition being treated, and the desired outcome. It may also depend upon the stage of the condition, the age and physical condition of the subject, the nature of concurrent therapy, if any, and like factors well-known to the medical practitioner. For therapeutic applications, it is that amount sufficient to achieve a medically desirable result.

[0449] In some embodiments, compositions in accordance with the present disclosure can be used for treatment of any of a variety of diseases, disorders, and/or conditions.

### Methods of Treatment

[0450] Some aspects of the present disclosure provide methods of treating a subject in need thereof (e.g., a subject having or having a propensity to develop an undesirable immune response, an autoimmune or alloimmune disease, and/or GVHD) the method comprising administering to a subject in need an effective therapeutic amount of a pharmaceutical composition as described herein. More specifically, the methods of treatment include administering to a subject in need thereof one or more pharmaceutical compositions comprising one or more cells having at least one edited gene. In other embodiments, the methods of the disclosure comprise expressing or introducing into a cell a base editor polypeptide and one or more guide RNAs capable of targeting a nucleic acid molecule encoding at least one polypeptide.

[0451] One of ordinary skill in the art would recognize that multiple administrations of the pharmaceutical compositions contemplated in particular embodiments may be required to affect the desired therapy. For example, a composition may be administered to the subject 1, 2, 3, 4, 5, 6, 7, 8, 9, or 10 or more times over a span of 1 week, 2 weeks, 3 weeks, 1 month, 2 months, 3 months, 4 months, 5 months, 6 months, 1 year, 2 years, 5, years, 10 years, or more.

[0452] Administration of the pharmaceutical compositions contemplated herein may be carried out using conventional techniques including, but not limited to, infusion, transfusion, or parenterally. In some embodiments, parenteral administration includes infusing or injecting intravascularly, intravenously, intramuscularly, intraarterially, intrathecally, intratumorally, intradermally, intraperitoneally, transtracheally, subcutaneously, subcuticularly, intraarticularly, subcapsularly, subarachnoidly and intrasternally.

[0453] In embodiments, administration of CAR T_{REG} cells of the present disclosure is associated with reduction in one or more symptoms of an autoimmune and/or alloimmune disease or disorder in a subject. For example, in some cases, administration of the CAR T_{REG} cells is associated with a reduction in a symptom of graft versus host disease.

### Kits

[0454] The disclosure provides kits for the treatment of a subject having or having a propensity to develop an undesirable immune response, an autoimmune or alloimmune disease, and/or graft versus host disease. In some embodiments, the kit further includes a base editor system or a polynucleotide encoding a base editor system, wherein the base editor polypeptide system a nucleic acid programmable DNA binding protein (napDNAbp), a deaminase, and a guide RNA. In some embodiments, the napDNAbp is Cas9 or Cas12. In some embodiments, the polynucleotide encoding the base editor is a mRNA sequence. In some embodiments, the deaminase is a cytidine deaminase or an adenosine deaminase. In some embodiments, the kit comprises an edited cell and instructions regarding the use of such cell.

[0455] The kits may further comprise written instructions for using a base editor, base editor system and/or edited cell as described herein. In other embodiments, the instructions include at least one of the following: precautions; warnings; clinical studies; and/or references. The instructions may be printed directly on the container (when present), or as a label applied to the container, or as a separate sheet, pamphlet, card, or folder supplied in or with the container. In a further embodiment, a kit comprises instructions in the form of a label or separate insert (package insert) for suitable operational parameters. In yet another embodiment, the kit comprises one or more containers with appropriate positive and negative controls or control samples, to be used as standard(s) for detection, calibration, or normalization. The kit can further comprise a second container comprising a pharmaceutically acceptable buffer, such as (sterile) phosphate-buffered saline, Ringer's solution, or dextrose solution. It can further include other materials desirable from a commercial and user standpoint, including other buffers, diluents, filters, needles, syringes, and package inserts with instructions for use.

[0456] The practice of the present disclosure employs, unless otherwise indicated, conventional techniques of molecular biology (including recombinant techniques), microbiology, cell biology, biochemistry and immunology, which are well within the purview of the skilled artisan. Such techniques are explained fully in the literature, such as, “Molecular Cloning: A Laboratory Manual”, second edition (Sambrook, 1989); “Oligonucleotide Synthesis” (Gait, 1984); “Animal Cell Culture” (Freshney, 1987); “Methods in Enzymology” “Handbook of Experimental Immunology” (Weir, 1996); “Gene Transfer Vectors for Mammalian Cells” (Miller and Calos, 1987); “Current Protocols in Molecular Biology” (Ausubel, 1987); “PCR: The Polymerase Chain Reaction”, (Mullis, 1994); “Current Protocols in Immunology” (Coligan, 1991). These techniques are applicable to the production of the polynucleotides and polypeptides of the disclosure, and, as such, may be considered in making and practicing embodiments of the disclosure. Particularly useful techniques for particular embodiments will be discussed in the sections that follow.

[0457] The following examples are put forth so as to provide those of ordinary skill in the art with a complete disclosure and description of how to make and use the assay, screening, and therapeutic methods of the disclosure, and are not intended to limit the scope of what the inventors regard as their invention.

### EXAMPLES

### Example 1: Base Editing of T_{REG} Cells to Disrupt Expression of Cluster of Differentiation 70 (CD70)

[0458] Experiments were undertaken to prepare chimeric antigen receptor (CAR) regulatory T (T_{REG}) cells with improved functionality and lineage stability by using base editing to disrupt surface receptors. As shown in FIG. 2, reducing or eliminating expression of cluster of differentiation 70 (CD70) in T_{REG} cells can improve the function of the T_{REG} cells by preventing stimulation of T_{CONV} cells through the interaction of CD70 with cluster of differentiation 27 (CD27) on the T_{CONV} cells (see FIGS. 3A and 3B).

[0459] As shown in the flow cytometry scatter plots of FIGS. 4A-4D, CD70− T_{REG} cells showed increased expression of the T_{REG} activation markers FOXP3, GARP, Helios, and CTLA-4. The T_{REG} edited cells showed an increase in Helios and FoxP3 expression relative to unedited T_{REG} cells. The CD70− T_{REG} cells showed an increase in CTLA4 levels.

[0460] Guide RNA's were designed to facilitate base editing of the CD70 gene in T_{REG} cells (see Tables 1A-2C). Guide RNAs TSBTx2810, TSBTx2813, and TSBTx2815 (see Tables 1A-2C) were transfected into cells along with mRNA encoding an ABE and guide RNAs TSBTx2813, TSBTx2814, and TSBTx2816 (see Tables 1A-2C) were transfected into cells along with mRNA encoding a CBE. The resulting maximum on-target (i.e., “max on-target”) and total (i.e., “max on-target” plus “bystander”) editing activities were measured using next generation sequencing (see FIGS. 5A and 5B). The guide RNAs successfully facilitated editing of the CD70 gene in the T_{REG} cells, which resulted in a reduction in detected surface-expression of CD70 in the cells, as shown in FIG. 6.

[0461] The CD70− base-edited T_{REG} cells were phenotypically indistinguishable from unedited control T_{REG} cells (see FIGS. 7A-7C), as determined through measurement of FoxP3, Helios, GARP, LAP, IL-2, IL-10, IL-8, CCL4, and GZMB polypeptide expression.

[0462] As shown in FIGS. 8A and 8B, T_{CONV} cells showed reduced costimulation when cocultured with the CD70− T_{REG} cells. This was demonstrated by co-culturing CD70+ T_{REG} cells and CD70− T_{REG} cells with T_{CONV} cells and measuring proliferation of the T_{CONV} cells using CellTrace™ Violet dye. Therefore, disruption of CD70 expression in the T_{REG} cells improved T_{REG} cell function by reducing activation of T_{CONV} cells by the T_{REG} cells.

### Example 2: Base Editing of T_{REG} Cells to Disrupt Expression of Cluster of Differentiation 58 (CD58), PD-1, SIRT1, and B2M

[0463] Experiments were undertaken to design guide RNAs suitable for use in base-editing T_{REG} cells to disrupt expression of Cluster of Differentiation 58 (CD58), PD-1, SIRT1, and B2M. As shown in FIG. 2, knockout of PD-1 can prevent dampening of T_{REG} cell activation through the interaction of PD-1 with PD-L1 expressed on T_{CONV} cells, and knockout of CD58 can prevent activation of T_{CONV} cells through the interaction of CD58 with CD2 expressed on the T_{CONV} cells. As shown in FIG. 18, SIRT1 is a lysine deacetylase that is associated with FoxP3 ubiquitination. Therefore, knocking out SIRT1 can be used to increase expression levels of the important T_{REG} transcription factor FoxP3, thereby improving T_{REG} cell function. Knockout of B2M can be used to prevent allorecognition of edited T_{REG} cells (see FIG. 18).

[0464] T_{REG} cells were transfected with the guide RNA TSBTx2834 (see Tables 1A-2C) targeting CD58 and mRNA encoding an adenosine base editor (ABE8.20). The maximum on-target base editing of the CD58 gene is shown in FIG. 9. The maximum on-target base editing was greater than 80%.

[0465] T_{REG} cells were transfected with the guide RNA TSBTx025 (see Tables 1A-2C) targeting PD-1 and mRNA encoding an adenosine base editor (ABE8.20). The maximum on-target base editing of the PD-1 gene is shown in FIG. 11. The maximum on-target base editing was greater than 80%. Reduction of surface expression of PD-1 in the PD-1-edited T_{REG} cells was confirmed using flow cytometry (see FIG. 10A). FIG. 10B illustrates how PD-1 expressed by T_{REG} cells can interact with PD-L1 expressed on the surface of a T cell, which results in inhibition of the T_{REG} cell. FIG. 10C shows that T_{CONV} and T_{REG} cells surface expressed CD27 and PD-1 and FIG. 10D shows that PD-L1 was surface-expressed in T cells. Disruption of PD-1 expression in T_{REG} cells can “take the brakes” off Treg cells and can increase the likelihood of Treg activation in the presence of PD-L1 ligand. PD-1 is an inhibitory receptor that dampens Treg activation.

[0466] SIRT1 encodes a nicotinamide adenine dinucleotide (NAD+) dependent histone deacetylase. SIRT1 targets histone and non-histone proteins and can function as a transcription factor. Disruption of Sirt1 expression promotes the expression of FoxP3, a key transcription factor in T_{REG} cells. Therefore, T_{REG} cells were transfected with the guide RNA TSBTx2817 (see Tables 1A-2C) targeting SIRT1 and mRNA encoding an adenosine base editor (ABE8.20). The maximum on-target base editing of the SIRT1 gene is shown in FIG. 12. The maximum on-target base editing was greater than 80%. Also, T_{CONV} cells were transfected with guide RNAs TSBTx2817, TSBTx2818, TSBTx2819, TSBTx2820, TSBTx2821, TSBTx2822, TSBTx2823, TSBTx2824, TSBTx2825, TSBTx2826, TSBTx2827, TSBTx2828, TSBTx2830, or TSBTx2831 in combination with mRNA encoding an adenosine deaminase (ABE8.20) or a cytidine deaminase (CBE). The amino acid sequence of the CBE used is provided at SEQ ID NO: 3357 and contained two UGI domains, an SpCas9n domain, and a cytidine deaminase domain. The maximum base editing of the SIRT1 gene in the T_{CONV} cells is shown in FIG. 13. As shown by comparison of FIGS. 12 and 13, base editing efficiencies in T_{CONV} cells were predictive of base editing efficiencies in T_{REG} cells (compare editing for the guide RNA TSBTx2817 in FIGS. 12 and 13).

[0467] T_{REG} cells were transfected with the guide RNA TSBTx845 (see Tables 1A-2C) targeting CD58 and mRNA encoding an adenosine base editor (ABE8.20) or a cytidine base editor (CBE). The maximum on-target base editing of the CD58 gene is shown in FIG. 14. The maximum on-target base editing was about 80%.

### Example 3: Base Editing of T_{REG} Cells to Disrupt Expression of RNF20 RNF20 is an E3 Ubiquitin Ligase that Functions as a Modulator of FoxP3 Expression

[0468] Accordingly, knocking out SIRT1 can be used to increase expression levels of the important T_{REG} transcription factor FoxP3, thereby improving T_{REG} cell function. RNF20 knockout rescues impairment of FoxP3 transcription exhibited by USP-22-null T_{REG} cells, where USP-22 is involved in the deubiquitination module of the SAGA chromatin remodeling complex. RNF20 is a negative regulator of FoxP3. Therefore, experiments were undertaken to design guide RNAs suitable for use in base-editing T_{REG} cells to disrupt expression of RNF20 to modulate Fox-3 expression. Guides RNAs for targeting RNF20 were screened in T cells to identify guides for use in T_{REG} cells.

[0469] T_{CONV} cells were transfected with the guide RNAs TSBTx1680, TSBTx1681, TSBTx1682, TSBTx1683, TSBTx1684, TSBTx1685, TSBTx1686, TSBTx1687, TSBTx1688, TSBTx1689, TSBTx1690, TSBTx1691, TSBTx1692, TSBTx1693, TSBTx1694, TSBTx1695, TSBTx1696, TSBTx1697, TSBTx1698, or TSBTx2853 (see Tables 1A-2C) targeting RNF20 and mRNA encoding an adenosine base editor (ABE) or a cytidine base editor (CBE). The maximum on-target base editing of the RNF20 gene is shown in FIG. 15. T_{REG} cells were then transfected with the guide RNAs TSBTx1681, TSBTx1687, or TSBTx1697 (see Tables 1A-2C) targeting RNF20 and mRNA encoding an adenosine base editor (ABE). The maximum on-target base editing is shown in FIG. 16. As shown by comparison of FIGS. 15 and 16, base editing efficiencies in T_{CONV} cells were predictive of base editing efficiencies in T_{REG} cells (compare max editing for the guides TSBTx1681, TSBTx1687, and TSBTx1697 in FIGS. 12 and 13).

[0470] The RNF20-edited T_{REG} cells showed a shift in FoxP3 mean fluorescent intensity (MFI), as measured using flow cytometry, that was consistent with increased expression of FoxP3 relative to unedited T_{REG} cells (see FIGS. 17A and 17B). Increase in FoxP3 expression is indicative of T_{REG} lineage stabilization.

### Example 4: Multiplex Base Editing of Regulatory T (T_{REG}) Cells

[0471] Chimeric antigen receptor (CAR) T_{REG} cell function can be improved by disrupting multiple genes encoding surface receptors in the cells (see FIG. 18). For example, disruption of SIRT1 or RNF20 can lead to an increase in the important T_{REG} transcriptional regulator FoxP3, disruption of PD-1, CD70, and/or CD58 can reduce activation of T_{CONV} cells by edited CAR T_{REG} cells, and disruption of B2M in CAR T_{REG} cells can prevent allorecognition of the T_{REG} cells in a subject. Therefore, experiments were undertaken to 5-plex edit CD70, SIRT1, CD58, PD-1, and B2M in T_{REG} cells.

[0472] T_{CONV} cells were transfected in parallel with the guide RNAs TSBTx2813, TSBTx2817, TSBTx2834, TSBTx025, and TSBTx845 (see Tables 1A-2C) targeting CD70, SIRT1, CD58, PD-1, and B2M, respectively, and mRNA encoding an adenosine base editor (ABE). The resulting on-target editing efficiencies are shown in FIG. 19. The multiplex-edited cells were transfected with a polynucleotide encoding an anti-NGFR chimeric antigen receptor (CAR) to prepare multi-plex edited CAR T_{REG} cells. Reduced surface expression of the target genes in the multi-plex edited CAR T_{REG} cells was confirmed using flow cytometry (see FIG. 20).

### Example 5: Increasing Lineage Stability of T_{REG} Cells Through Base Editing of BRINP1, JNK1, PRKCQ, and CHIP

[0473] Expression of FoxP3 in a regulatory T (T_{REG}) cell can be increased and/or stabilized, and thus the lineage stability of the T_{REG} cell increased, by modifying the cell to reduce or eliminate expression of one or more of BRINP1, JNK1, PRKCQ, and CHIP. Therefore, experiments are undertaken to modify BRINP1, JNK1, PRKCQ, and CHIP genes in T_{REG} cells to reduce or eliminate expression of the BRINP1, JNK1, PRKCQ, and CHIP polypeptides encoded thereby.

[0474] Guide RNAs are designed targeting genes encoding BRINP1, JNK1, PRKCQ, and CHIP (see Tables 1A-2C). T_{REG} cells are transfected with guides listed in Tables 1A-2C targeting each of the genes and mRNA encoding an adenosine base editor (ABE) and/or a cytidine base editor (CBE). The edited cells show reduced or eliminated expression of BRINP1, JNK1, PRKCQ, and/or CHIP and increased expression levels of FoxP3 and/or increased lineage stability.

### Example 6: Increasing Lineage Stability of T_{REG} Cells Through Modification of CHIP and RNF20 Genes Using an Endonuclease

[0475] Experiments are undertaken to disruption expression and/or activity of genes encoding CHIP and RNF20 in T_{REG} Cells using an endonuclease.

[0476] Guide RNAs are designed targeting genes encoding CHIP and RNF20 (see Tables 1A-2C). T_{REG} cells are transfected with guides listed in Tables 1A-2C targeting each of the genes and mRNA encoding a Cas12b polypeptide. The edited cells show reduced or eliminated expression of RNF20 and/or CHIP and increased expression levels of FoxP3 and/or increased lineage stability.

[0477] The following methods were employed in the above examples.

### Preparation of Peripheral Blood Mononuclear Cells (PBMCs) and Regulatory T Cells (T_{REG} 's)

[0478] As shown in FIG. 1, the preparation of PBMCs and T_{REG}'S involved seven (7) steps: 1) Receive fresh leukopak (HemaCare); 2) Process leukopak by ficoll density gradient centrifugation to isolate PBMCs; 3) Cryopreserve PBMCs for convenient use; 4) Thaw cryopreserved PBMCs; 5) Isolate CD4+ T cells by magnetic selection (i.e., CD4 Microbeads, Miltenyi); 6) Stain CD4+ T cells with fluorochrome conjugated antibodies and FACS sort; and 7) Sort T_{REG} cells: Viable/CD4+/CD25++/CD127. T_{REG} cells were sorted out based upon high CD4 expression, high CD25 expression, and low CD127 expression. The gating strategy used to select for viable T_{REG} cells is presented in the lower portion of FIG. 1 as a series of representative flow cytometry scatter plots.

### Ex Vivo Expansion and Editing of T_{REG}'s

[0479] Editing of T_{REG}'S post-sorting included the following five (5) steps: 1) T_{REG}'S were counted and the cell medium was replaced; 2) cells were stimulated with ImmunoCult™ CD3/CD28/CD2 T cell Activator 1:40 (25 μL/mL and 1e6 cells/mL) in XF media with serum replacement; 3) 5 days post-stimulation the cells were edited using a standard T cell editing protocol (500k-1e6 cells per 200 μL reaction); 4) check for editing via Flow and/or next-generation sequencing (NGS) at least 72 hours post-editing; 5) phenotype cells on day 7 and day 14 to verify T_{REG} phenotype over time.

mRNA Production

[0480] Editors/nucleases were cloned into a plasmid encoding a dT7 promoter followed by a 5′UTR, Kozak sequence, ORF, and 3′UTR. The dT7 promoter carries an inactivating point mutation within the T7 promoter that prevents transcription from circular plasmid. This plasmid templated a PCR reaction (Q5 Hot Start 2× Master Mix), in which the forward primer corrected the SNP within the T7 promoter and the reverse primer appended a 120A tail to the 3′ UTR. The resulting PCR product was purified on a Zymo Research 25 μg DCC column and used as mRNA template in the subsequent in vitro transcription. The NEB HiScribe High-Yield Kit was used as per the instruction manual but with full substitution of N1-methyl-pseudouridine for uridine and co-transcriptional capping with CleanCap AG (Trilink). Reaction cleanup was performed by lithium chloride precipitation.

In Vitro Transcription of sgRNAs.

[0481] Linear DNA fragments containing the CMV promoter followed by the sgRNA target sequence were transcribed in vitro using the TranscriptAid T7 High Yield Transcription Kit (ThermoFisher Scientific) according to the manufacturer's instructions. sgRNA products were purified using the MEGAclear Kit (ThermoFisher Scientific) according to the manufacturer's instructions and quantified by UV absorbance.

### Next-Generation DNA Sequencing

[0482] Samples were sequenced on an Illumina MiSeq as previously described (Pattanayak, Nature Biotechnol. 31, 839-843 (2013)).

### Data Analysis

[0483] Sequencing reads were automatically demultiplexed using MiSeq Reporter (Illumina), and individual FASTQ files were analyzed with a custom Matlab. Each read was pairwise aligned to the appropriate reference sequence using the Smith-Waterman algorithm. Base calls with a Q-score below 31 were replaced with Ns and were thus excluded in calculating nucleotide frequencies. This treatment yields an expected MiSeq base-calling error rate of approximately 1 in 1,000. Aligned sequences in which the read and reference sequence contained no gaps were stored in an alignment table from which base frequencies could be tabulated for each locus. Indel frequencies were quantified with a custom Matlab script using previously described criteria (Zuris, et al., Nature Biotechnol. 33, 73-80 (2015). Sequencing reads were scanned for exact matches to two 10-bp sequences that flank both sides of a window in which indels might occur. If no exact matches were located, the read was excluded from analysis. If the length of this indel window exactly matched the reference sequence the read was classified as not containing an indel. If the indel window was two or more bases longer or shorter than the reference sequence, then the sequencing read was classified as an insertion or deletion, respectively.

### OTHER EMBODIMENTS

[0484] From the foregoing description, it will be apparent that variations and modifications may be made to the aspects and embodiments thereof described herein to adopt them to various usages and conditions. Such embodiments are also within the scope of the following claims.

[0485] The recitation of a listing of elements in any definition of a variable herein includes definitions of that variable as any single element or combination (or subcombination) of listed elements. The recitation of an embodiment herein includes that embodiment as any single embodiment or in combination with any other embodiments or portions thereof.

[0486] All patents and publications mentioned in this specification are herein incorporated by reference to the same extent as if each independent patent and publication was specifically and individually indicated to be incorporated by reference. The application may be related to U.S. Provisional Applications No. 63/233,648, filed 16 Aug. 2021, 63/293,692, filed 24 Dec. 2021, 63/293,722, filed 24 Dec. 2021, or 63/336,109, filed 28 Apr. 2022, the disclosures of which are incorporated herein by reference in their entireties for all purposes.

The application's sequence listing, which the Patent Office published only in electronic form, follows.

SEQUENCE LISTING (3394 sequences)

SEQ ID NO: 1 - protein, 167 aa, Escherichia coli
  REGION 1..167: note = misc_feature - TadA*7.10 (ecTadA) polypeptide sequence
MSEVEFSHEYWMRHALTLAKRARDEREVPVGAVLVLNNRVIGEGWNRAIGLHDPTAHAEIMALRQGGLVMQNYRLIDATLYVTFEPCVMCAGAMIHSRIGRVVFGVRNAKTGAAGSLMDVLHYPGMNHRVEITEGILADECAALLCYFFRMPRQVFNAQKKAQSSTD

SEQ ID NO: 2 - DNA, 4092 bp, synthetic construct
  misc_feature 1..4092: note = BhCas12b GGSGGS-ABE8-Xten20at P153 polynucleotide sequence
  misc_feature 1..6: note = Kozak sequence
  misc_feature 7..57: note = Sequence encoding N-terminal nuclear localization signal
  misc_feature 58..513: note = Sequence encoding BhCas12b
  misc_feature 514..531: note = Sequence encoding a linker
  misc_feature 532..1029: note = Sequence encoding TadA*8
  misc_feature 1030..1089: note = Sequence encoding Xten20 linker
  misc_feature 1090..3954: note = Sequence encoding BhCas12b
  misc_feature 3955..4002: note = Sequence encoding C-terminal NLS
  misc_feature 4003..4008: note = Sequence encoding GS linker
  misc_feature 4009..4089: note = Sequence encoding 3x hemagglutinin (HA) tag
  source 1..4092: mol_type = other DNA
gccaccatggccccaaagaagaagcggaaggtcggtatccacggagtcccagcagccgccaccagatccttcatcctgaagatcgagcccaacgaggaagtgaagaaaggcctctggaaaacccacgaggtgctgaaccacggaatcgcctactacatgaatatcctgaagctgatccggcaagaggccatctacgagcaccacgagcaggaccccaagaatcccaagaaggtgtccaaggccgagatccaggccgagctgtgggatttcgtgctgaagatgcagaagtgcaacagcttcacacacgaggtggacaaggacgaggtgttcaacatcctgagagagctgtacgaggaactggtgcccagcagcgtggaaaagaagggcgaagccaaccagctgagcaacaagtttctgtaccctctggtggaccccaacagccagtctggaaagggaacagccagcagcggcagaaagcccagatggtacaacctgaagattgccggcgatcccggaggctctggaggaagctccgaagtcgagttttcccatgagtactggatgagacacgcattgactctcgcaaagagggctcgagatgaacgcgaggtgcccgtgggggcagtactcgtgctcaacaatcgcgtaatcggcgaaggttggaatagggcaatcggactccacgaccccactgcacatgcggaaatcatggcccttcgacagggagggcttgtgatgcagaattatcgactttatgatgcgacgctgtacgtcacgtttgaaccttgcgtaatgtgcgcgggagctatgattcactcccgcattggacgagttgtattcggtgttcgcaacgccaagacgggtgccgcaggttcactgatggacgtgctgcatcatccaggcatgaaccaccgggtagaaatcacagaaggcatattggcggacgaatgtgcggcgctgttgtgtcgtttttttcgcatgcccaggcgggtctttaacgcccagaaaaaagcacaatcctctactgacggctcttctggatctgaaacacctggcacaagcgagagcgccacccctgagagctctggctcctgggaagaagagaagaagaagtgggaagaagataagaaaaaggacccgctggccaagatcctgggcaagctggctgagtacggactgatccctctgttcatcccctacaccgacagcaacgagcccatcgtgaaagaaatcaagtggatggaaaagtcccggaaccagagcgtgcggcggctggataaggacatgttcattcaggccctggaacggttcctgagctgggagagctggaacctgaaagtgaaagaggaatacgagaaggtcgagaaagagtacaagaccctggaagagaggatcaaagaggacatccaggctctgaaggctctggaacagtatgagaaagagcggcaagaacagctgctgcgggacaccctgaacaccaacgagtaccggctgagcaagagaggccttagaggctggcgggaaatcatccagaaatggctgaaaatggacgagaacgagccctccgagaagtacctggaagtgttcaaggactaccagcggaagcaccctagagaggccggcgattacagcgtgtacgagttcctgtccaagaaagagaaccacttcatctggcggaatcaccctgagtacccctacctgtacgccaccttctgcgagatcgacaagaaaaagaaggacgccaagcagcaggccaccttcacactggccgatcctatcaatcaccctctgtgggtccgattcgaggaaagaagcggcagcaacctgaacaagtacagaatcctgaccgagcagctgcacaccgagaagctgaagaaaaagctgacagtgcagctggaccggctgatctaccctacagaatctggcggctgggaagagaagggcaaagtggacattgtgctgctgcccagccggcagttctacaaccagatcttcctggacatcgaggaaaagggcaagcacgccttcacctacaaggatgagagcatcaagttccctctgaagggcacactcggcggagccagagtgcagttcgacagagatcacctgagaagataccctcacaaggtggaaagcggcaacgtgggcagaatctacttcaacatgaccgtgaacatcgagcctacagagtccccagtgtccaagtctctgaagatccaccgggacgacttccccaaggtggtcaacttcaagcccaaagaactgaccgagtggatcaaggacagcaagggcaagaaactgaagtccggcatcgagtccctggaaatcggcctgagagtgatgagcatcgacctgggacagagacaggccgctgccgcctctattttcgaggtggtggatcagaagcccgacatcgaaggcaagctgtttttcccaatcaagggcaccgagctgtatgccgtgcacagagccagcttcaacatcaagctgcccggcgagacactggtcaagagcagagaagtgctgcggaaggccagagaggacaatctgaaactgatgaaccagaagctcaacttcctgcggaacgtgctgcacttccagcagttcgaggacatcaccgagagagagaagcgggtcaccaagtggatcagcagacaagagaacagcgacgtgcccctggtgtaccaggatgagctgatccagatccgcgagctgatgtacaagccttacaaggactgggtcgccttcctgaagcagctccacaagagactggaagtcgagatcggcaaagaagtgaagcactggcggaagtccctgagcgacggaagaaagggcctgtacggcatctccctgaagaacatcgacgagatcgatcggacccggaagttcctgctgagatggtccctgaggcctaccgaacctggcgaagtgcgtagactggaacccggccagagattcgccatcgaccagctgaatcacctgaacgccctgaaagaagatcggctgaagaagatggccaacaccatcatcatgcacgccctgggctactgctacgacgtgcggaagaagaaatggcaggctaagaaccccgcctgccagatcatcctgttcgaggatctgagcaactacaacccctacgaggaaaggtcccgcttcgagaacagcaagctcatgaagtggtccagacgcgagatccccagacaggttgcactgcagggcgagatctatggcctgcaagtgggagaagtgggcgctcagttcagcagcagattccacgccaagacaggcagccctggcatcagatgtagcgtcgtgaccaaagagaagctgcaggacaatcggttcttcaagaatctgcagagagagggcagactgaccctggacaaaatcgccgtgctgaaagagggcgatctgtacccagacaaaggcggcgagaagttcatcagcctgagcaaggatcggaagtgcgtgaccacacacgccgacatcaacgccgctcagaacctgcagaagcggttctggacaagaacccacggcttctacaaggtgtactgcaaggcctaccaggtggacggccagaccgtgtacatccctgagagcaaggaccagaagcagaagatcatcgaagagttcggcgagggctacttcattctgaaggacggggtgtacgaatgggtcaacgccggcaagctgaaaatcaagaagggcagctccaagcagagcagcagcgagctggtggatagcgacatcctgaaagacagcttcgacctggcctccgagctgaaaggcgaaaagctgatgctgtacagggaccccagcggcaatgtgttccccagcgacaaatggatggccgctggcgtgttcttcggaaagctggaacgcatcctgatcagcaagctgaccaaccagtactccatcagcaccatcgaggacgacagcagcaagcagtctatgaaaaggccggcggccacgaaaaaggccggccaggcaaaaaagaaaaagggatcctacccatacgatgttccagattacgcttatccctacgacgtgcctgattatgcatacccatatgatgtccccgactatgcctaa

SEQ ID NO: 3 - protein, 1361 aa, synthetic construct
  REGION 1..1361: note = BhCas12b GGSGGS-ABE8-Xten20at P153 polypeptide sequence
MAPKKKRKVGIHGVPAAATRSFILKIEPNEEVKKGLWKTHEVLNHGIAYYMNILKLIRQEAIYEHHEQDPKNPKKVSKAEIQAELWDFVLKMQKCNSFTHEVDKDEVFNILRELYEELVPSSVEKKGEANQLSNKFLYPLVDPNSQSGKGTASSGRKPRWYNLKIAGDPGGSGGSSEVEFSHEYWMRHALTLAKRARDEREVPVGAVLVLNNRVIGEGWNRAIGLHDPTAHAEIMALRQGGLVMQNYRLYDATLYVTFEPCVMCAGAMIHSRIGRVVFGVRNAKTGAAGSLMDVLHHPGMNHRVEITEGILADECAALLCRFFRMPRRVFNAQKKAQSSTDGSSGSETPGTSESATPESSGSWEEEKKKWEEDKKKDPLAKILGKLAEYGLIPLFIPYTDSNEPIVKEIKWMEKSRNQSVRRLDKDMFIQALERFLSWESWNLKVKEEYEKVEKEYKTLEERIKEDIQALKALEQYEKERQEQLLRDTLNTNEYRLSKRGLRGWREIIQKWLKMDENEPSEKYLEVFKDYQRKHPREAGDYSVYEFLSKKENHFIWRNHPEYPYLYATFCEIDKKKKDAKQQATFTLADPINHPLWVRFEERSGSNLNKYRILTEQLHTEKLKKKLTVQLDRLIYPTESGGWEEKGKVDIVLLPSRQFYNQIFLDIEEKGKHAFTYKDESIKFPLKGTLGGARVQFDRDHLRRYPHKVESGNVGRIYFNMTVNIEPTESPVSKSLKIHRDDFPKVVNFKPKELTEWIKDSKGKKLKSGIESLEIGLRVMSIDLGQRQAAAASIFEVVDQKPDIEGKLFFPIKGTELYAVHRASFNIKLPGETLVKSREVLRKAREDNLKLMNQKLNFLRNVLHFQQFEDITEREKRVTKWISRQENSDVPLVYQDELIQIRELMYKPYKDWVAFLKQLHKRLEVEIGKEVKHWRKSLSDGRKGLYGISLKNIDEIDRTRKFLLRWSLRPTEPGEVRRLEPGQRFAIDQLNHLNALKEDRLKKMANTIIMHALGYCYDVRKKKWQAKNPACQIILFEDLSNYNPYEERSRFENSKLMKWSRREIPRQVALQGEIYGLQVGEVGAQFSSRFHAKTGSPGIRCSVVTKEKLQDNRFFKNLQREGRLTLDKIAVLKEGDLYPDKGGEKFISLSKDRKCVTTHADINAAQNLQKRFWTRTHGFYKVYCKAYQVDGQTVYIPESKDQKQKIIEEFGEGYFILKDGVYEWVNAGKLKIKKGSSKQSSSELVDSDILKDSFDLASELKGEKLMLYRDPSGNVFPSDKWMAAGVFFGKLERILISKLTNQYSISTIEDDSSKQSMKRPAATKKAGQAKKKKGSYPYDVPDYAYPYDVPDYAYPYDVPDYA

SEQ ID NO: 4 - DNA, 4092 bp, synthetic construct
  misc_feature 1..4092: note = BhCas12b GGSGGS-ABE8-Xten20at K255 polynucleotide sequence
  misc_feature 1..6: note = Kozak sequence
  misc_feature 7..57: note = Sequence encoding N-terminal nuclear localization signal (NLS)
  misc_feature 58..822: note = Sequence encoding BhCas12b
  misc_feature 823..840: note = Sequence encoding a linker
  misc_feature 841..1338: note = Sequence encoding TadA*8
  misc_feature 1339..1398: note = Sequence encoding Xten20 linker
  misc_feature 1399..3954: note = Sequence encoding BhCas12b
  misc_feature 3955..4002: note = Sequence encoding C-terminal NLS
  misc_feature 4003..4008: note = Sequence encoding a GS linker
  misc_feature 4009..4089: note = Sequence encoding 3x hemagglutinin (HA) tag
  source 1..4092: mol_type = other DNA
gccaccatggccccaaagaagaagcggaaggtcggtatccacggagtcccagcagccgccaccagatccttcatcctgaagatcgagcccaacgaggaagtgaagaaaggcctctggaaaacccacgaggtgctgaaccacggaatcgcctactacatgaatatcctgaagctgatccggcaagaggccatctacgagcaccacgagcaggaccccaagaatcccaagaaggtgtccaaggccgagatccaggccgagctgtgggatttcgtgctgaagatgcagaagtgcaacagcttcacacacgaggtggacaaggacgaggtgttcaacatcctgagagagctgtacgaggaactggtgcccagcagcgtggaaaagaagggcgaagccaaccagctgagcaacaagtttctgtaccctctggtggaccccaacagccagtctggaaagggaacagccagcagcggcagaaagcccagatggtacaacctgaagattgccggcgatccctcctgggaagaagagaagaagaagtgggaagaagataagaaaaaggacccgctggccaagatcctgggcaagctggctgagtacggactgatccctctgttcatcccctacaccgacagcaacgagcccatcgtgaaagaaatcaagtggatggaaaagtcccggaaccagagcgtgcggcggctggataaggacatgttcattcaggccctggaacggttcctgagctgggagagctggaacctgaaagtgaaagaggaatacgagaaggtcgagaaagagtacaagaccctggaagagaggatcaaaggaggctctggaggaagctccgaagtcgagttttcccatgagtactggatgagacacgcattgactctcgcaaagagggctcgagatgaacgcgaggtgcccgtgggggcagtactcgtgctcaacaatcgcgtaatcggcgaaggttggaatagggcaatcggactccacgaccccactgcacatgcggaaatcatggcccttcgacagggagggcttgtgatgcagaattatcgactttatgatgcgacgctgtacgtcacgtttgaaccttgcgtaatgtgcgcgggagctatgattcactcccgcattggacgagttgtattcggtgttcgcaacgccaagacgggtgccgcaggttcactgatggacgtgctgcatcatccaggcatgaaccaccgggtagaaatcacagaaggcatattggcggacgaatgtgcggcgctgttgtgtcgtttttttcgcatgcccaggcgggtctttaacgcccagaaaaaagcacaatcctctactgacggctcttctggatctgaaacacctggcacaagcgagagcgccacccctgagagctctggcgaggacatccaggctctgaaggctctggaacagtatgagaaagagcggcaagaacagctgctgcgggacaccctgaacaccaacgagtaccggctgagcaagagaggccttagaggctggcgggaaatcatccagaaatggctgaaaatggacgagaacgagccctccgagaagtacctggaagtgttcaaggactaccagcggaagcaccctagagaggccggcgattacagcgtgtacgagttcctgtccaagaaagagaaccacttcatctggcggaatcaccctgagtacccctacctgtacgccaccttctgcgagatcgacaagaaaaagaaggacgccaagcagcaggccaccttcacactggccgatcctatcaatcaccctctgtgggtccgattcgaggaaagaagcggcagcaacctgaacaagtacagaatcctgaccgagcagctgcacaccgagaagctgaagaaaaagctgacagtgcagctggaccggctgatctaccctacagaatctggcggctgggaagagaagggcaaagtggacattgtgctgctgcccagccggcagttctacaaccagatcttcctggacatcgaggaaaagggcaagcacgccttcacctacaaggatgagagcatcaagttccctctgaagggcacactcggcggagccagagtgcagttcgacagagatcacctgagaagataccctcacaaggtggaaagcggcaacgtgggcagaatctacttcaacatgaccgtgaacatcgagcctacagagtccccagtgtccaagtctctgaagatccaccgggacgacttccccaaggtggtcaacttcaagcccaaagaactgaccgagtggatcaaggacagcaagggcaagaaactgaagtccggcatcgagtccctggaaatcggcctgagagtgatgagcatcgacctgggacagagacaggccgctgccgcctctattttcgaggtggtggatcagaagcccgacatcgaaggcaagctgtttttcccaatcaagggcaccgagctgtatgccgtgcacagagccagcttcaacatcaagctgcccggcgagacactggtcaagagcagagaagtgctgcggaaggccagagaggacaatctgaaactgatgaaccagaagctcaacttcctgcggaacgtgctgcacttccagcagttcgaggacatcaccgagagagagaagcgggtcaccaagtggatcagcagacaagagaacagcgacgtgcccctggtgtaccaggatgagctgatccagatccgcgagctgatgtacaagccttacaaggactgggtcgccttcctgaagcagctccacaagagactggaagtcgagatcggcaaagaagtgaagcactggcggaagtccctgagcgacggaagaaagggcctgtacggcatctccctgaagaacatcgacgagatcgatcggacccggaagttcctgctgagatggtccctgaggcctaccgaacctggcgaagtgcgtagactggaacccggccagagattcgccatcgaccagctgaatcacctgaacgccctgaaagaagatcggctgaagaagatggccaacaccatcatcatgcacgccctgggctactgctacgacgtgcggaagaagaaatggcaggctaagaaccccgcctgccagatcatcctgttcgaggatctgagcaactacaacccctacgaggaaaggtcccgcttcgagaacagcaagctcatgaagtggtccagacgcgagatccccagacaggttgcactgcagggcgagatctatggcctgcaagtgggagaagtgggcgctcagttcagcagcagattccacgccaagacaggcagccctggcatcagatgtagcgtcgtgaccaaagagaagctgcaggacaatcggttcttcaagaatctgcagagagagggcagactgaccctggacaaaatcgccgtgctgaaagagggcgatctgtacccagacaaaggcggcgagaagttcatcagcctgagcaaggatcggaagtgcgtgaccacacacgccgacatcaacgccgctcagaacctgcagaagcggttctggacaagaacccacggcttctacaaggtgtactgcaaggcctaccaggtggacggccagaccgtgtacatccctgagagcaaggaccagaagcagaagatcatcgaagagttcggcgagggctacttcattctgaaggacggggtgtacgaatgggtcaacgccggcaagctgaaaatcaagaagggcagctccaagcagagcagcagcgagctggtggatagcgacatcctgaaagacagcttcgacctggcctccgagctgaaaggcgaaaagctgatgctgtacagggaccccagcggcaatgtgttccccagcgacaaatggatggccgctggcgtgttcttcggaaagctggaacgcatcctgatcagcaagctgaccaaccagtactccatcagcaccatcgaggacgacagcagcaagcagtctatgaaaaggccggcggccacgaaaaaggccggccaggcaaaaaagaaaaagggatcctacccatacgatgttccagattacgcttatccctacgacgtgcctgattatgcatacccatatgatgtccccgactatgcctaa

SEQ ID NO: 5 - protein, 1361 aa, synthetic construct
  REGION 1..1361: note = BhCas12b GGSGGS-ABE8-Xten20at K255 polypeptide sequence
MAPKKKRKVGIHGVPAAATRSFILKIEPNEEVKKGLWKTHEVLNHGIAYYMNILKLIRQEAIYEHHEQDPKNPKKVSKAEIQAELWDFVLKMQKCNSFTHEVDKDEVFNILRELYEELVPSSVEKKGEANQLSNKFLYPLVDPNSQSGKGTASSGRKPRWYNLKIAGDPSWEEEKKKWEEDKKKDPLAKILGKLAEYGLIPLFIPYTDSNEPIVKEIKWMEKSRNQSVRRLDKDMFIQALERFLSWESWNLKVKEEYEKVEKEYKTLEERIKGGSGGSSEVEFSHEYWMRHALTLAKRARDEREVPVGAVLVLNNRVIGEGWNRAIGLHDPTAHAEIMALRQGGLVMQNYRLYDATLYVTFEPCVMCAGAMIHSRIGRVVFGVRNAKTGAAGSLMDVLHHPGMNHRVEITEGILADECAALLCRFFRMPRRVFNAQKKAQSSTDGSSGSETPGTSESATPESSGEDIQALKALEQYEKERQEQLLRDTLNTNEYRLSKRGLRGWREIIQKWLKMDENEPSEKYLEVFKDYQRKHPREAGDYSVYEFLSKKENHFIWRNHPEYPYLYATFCEIDKKKKDAKQQATFTLADPINHPLWVRFEERSGSNLNKYRILTEQLHTEKLKKKLTVQLDRLIYPTESGGWEEKGKVDIVLLPSRQFYNQIFLDIEEKGKHAFTYKDESIKFPLKGTLGGARVQFDRDHLRRYPHKVESGNVGRIYFNMTVNIEPTESPVSKSLKIHRDDFPKVVNFKPKELTEWIKDSKGKKLKSGIESLEIGLRVMSIDLGQRQAAAASIFEVVDQKPDIEGKLFFPIKGTELYAVHRASFNIKLPGETLVKSREVLRKAREDNLKLMNQKLNFLRNVLHFQQFEDITEREKRVTKWISRQENSDVPLVYQDELIQIRELMYKPYKDWVAFLKQLHKRLEVEIGKEVKHWRKSLSDGRKGLYGISLKNIDEIDRTRKFLLRWSLRPTEPGEVRRLEPGQRFAIDQLNHLNALKEDRLKKMANTIIMHALGYCYDVRKKKWQAKNPACQIILFEDLSNYNPYEERSRFENSKLMKWSRREIPRQVALQGEIYGLQVGEVGAQFSSRFHAKTGSPGIRCSVVTKEKLQDNRFFKNLQREGRLTLDKIAVLKEGDLYPDKGGEKFISLSKDRKCVTTHADINAAQNLQKRFWTRTHGFYKVYCKAYQVDGQTVYIPESKDQKQKIIEEFGEGYFILKDGVYEWVNAGKLKIKKGSSKQSSSELVDSDILKDSFDLASELKGEKLMLYRDPSGNVFPSDKWMAAGVFFGKLERILISKLTNQYSISTIEDDSSKQSMKRPAATKKAGQAKKKKGSYPYDVPDYAYPYDVPDYAYPYDVPDYA

SEQ ID NO: 6 - DNA, 4092 bp, synthetic construct
  misc_feature 1..4092: note = BhCas12b GGSGGS-ABE8-Xten20at D306 polynucleotide sequence
  misc_feature 1..6: note = Kozak sequence
  misc_feature 7..57: note = Sequence encoding N-terminal nuclear localization signal (NLS)
  misc_feature 58..975: note = Sequence encoding BhCas12b
  misc_feature 976..993: note = Sequence encoding a linker
  misc_feature 994..1491: note = Sequence encoding TadA*8
  misc_feature 1492..1551: note = Sequence encoding Xten20 linker
  misc_feature 1552..3954: note = Sequence encoding BhCas12b
  misc_feature 3955..4002: note = Sequence encoding C-terminal NLS
  misc_feature 4003..4008: note = Sequence encoding a GS linker
  misc_feature 4009..4089: note = Sequence encoding 3x hemagglutinin (HA) tag
  source 1..4092: mol_type = other DNA
gccaccatggccccaaagaagaagcggaaggtcggtatccacggagtcccagcagccgccaccagatccttcatcctgaagatcgagcccaacgaggaagtgaagaaaggcctctggaaaacccacgaggtgctgaaccacggaatcgcctactacatgaatatcctgaagctgatccggcaagaggccatctacgagcaccacgagcaggaccccaagaatcccaagaaggtgtccaaggccgagatccaggccgagctgtgggatttcgtgctgaagatgcagaagtgcaacagcttcacacacgaggtggacaaggacgaggtgttcaacatcctgagagagctgtacgaggaactggtgcccagcagcgtggaaaagaagggcgaagccaaccagctgagcaacaagtttctgtaccctctggtggaccccaacagccagtctggaaagggaacagccagcagcggcagaaagcccagatggtacaacctgaagattgccggcgatccctcctgggaagaagagaagaagaagtgggaagaagataagaaaaaggacccgctggccaagatcctgggcaagctggctgagtacggactgatccctctgttcatcccctacaccgacagcaacgagcccatcgtgaaagaaatcaagtggatggaaaagtcccggaaccagagcgtgcggcggctggataaggacatgttcattcaggccctggaacggttcctgagctgggagagctggaacctgaaagtgaaagaggaatacgagaaggtcgagaaagagtacaagaccctggaagagaggatcaaagaggacatccaggctctgaaggctctggaacagtatgagaaagagcggcaagaacagctgctgcgggacaccctgaacaccaacgagtaccggctgagcaagagaggccttagaggctggcgggaaatcatccagaaatggctgaaaatggacggaggctctggaggaagctccgaagtcgagttttcccatgagtactggatgagacacgcattgactctcgcaaagagggctcgagatgaacgcgaggtgcccgtgggggcagtactcgtgctcaacaatcgcgtaatcggcgaaggttggaatagggcaatcggactccacgaccccactgcacatgcggaaatcatggcccttcgacagggagggcttgtgatgcagaattatcgactttatgatgcgacgctgtacgtcacgtttgaaccttgcgtaatgtgcgcgggagctatgattcactcccgcattggacgagttgtattcggtgttcgcaacgccaagacgggtgccgcaggttcactgatggacgtgctgcatcatccaggcatgaaccaccgggtagaaatcacagaaggcatattggcggacgaatgtgcggcgctgttgtgtcgtttttttcgcatgcccaggcgggtctttaacgcccagaaaaaagcacaatcctctactgacggctcttctggatctgaaacacctggcacaagcgagagcgccacccctgagagctctggcgagaacgagccctccgagaagtacctggaagtgttcaaggactaccagcggaagcaccctagagaggccggcgattacagcgtgtacgagttcctgtccaagaaagagaaccacttcatctggcggaatcaccctgagtacccctacctgtacgccaccttctgcgagatcgacaagaaaaagaaggacgccaagcagcaggccaccttcacactggccgatcctatcaatcaccctctgtgggtccgattcgaggaaagaagcggcagcaacctgaacaagtacagaatcctgaccgagcagctgcacaccgagaagctgaagaaaaagctgacagtgcagctggaccggctgatctaccctacagaatctggcggctgggaagagaagggcaaagtggacattgtgctgctgcccagccggcagttctacaaccagatcttcctggacatcgaggaaaagggcaagcacgccttcacctacaaggatgagagcatcaagttccctctgaagggcacactcggcggagccagagtgcagttcgacagagatcacctgagaagataccctcacaaggtggaaagcggcaacgtgggcagaatctacttcaacatgaccgtgaacatcgagcctacagagtccccagtgtccaagtctctgaagatccaccgggacgacttccccaaggtggtcaacttcaagcccaaagaactgaccgagtggatcaaggacagcaagggcaagaaactgaagtccggcatcgagtccctggaaatcggcctgagagtgatgagcatcgacctgggacagagacaggccgctgccgcctctattttcgaggtggtggatcagaagcccgacatcgaaggcaagctgtttttcccaatcaagggcaccgagctgtatgccgtgcacagagccagcttcaacatcaagctgcccggcgagacactggtcaagagcagagaagtgctgcggaaggccagagaggacaatctgaaactgatgaaccagaagctcaacttcctgcggaacgtgctgcacttccagcagttcgaggacatcaccgagagagagaagcgggtcaccaagtggatcagcagacaagagaacagcgacgtgcccctggtgtaccaggatgagctgatccagatccgcgagctgatgtacaagccttacaaggactgggtcgccttcctgaagcagctccacaagagactggaagtcgagatcggcaaagaagtgaagcactggcggaagtccctgagcgacggaagaaagggcctgtacggcatctccctgaagaacatcgacgagatcgatcggacccggaagttcctgctgagatggtccctgaggcctaccgaacctggcgaagtgcgtagactggaacccggccagagattcgccatcgaccagctgaatcacctgaacgccctgaaagaagatcggctgaagaagatggccaacaccatcatcatgcacgccctgggctactgctacgacgtgcggaagaagaaatggcaggctaagaaccccgcctgccagatcatcctgttcgaggatctgagcaactacaacccctacgaggaaaggtcccgcttcgagaacagcaagctcatgaagtggtccagacgcgagatccccagacaggttgcactgcagggcgagatctatggcctgcaagtgggagaagtgggcgctcagttcagcagcagattccacgccaagacaggcagccctggcatcagatgtagcgtcgtgaccaaagagaagctgcaggacaatcggttcttcaagaatctgcagagagagggcagactgaccctggacaaaatcgccgtgctgaaagagggcgatctgtacccagacaaaggcggcgagaagttcatcagcctgagcaaggatcggaagtgcgtgaccacacacgccgacatcaacgccgctcagaacctgcagaagcggttctggacaagaacccacggcttctacaaggtgtactgcaaggcctaccaggtggacggccagaccgtgtacatccctgagagcaaggaccagaagcagaagatcatcgaagagttcggcgagggctacttcattctgaaggacggggtgtacgaatgggtcaacgccggcaagctgaaaatcaagaagggcagctccaagcagagcagcagcgagctggtggatagcgacatcctgaaagacagcttcgacctggcctccgagctgaaaggcgaaaagctgatgctgtacagggaccccagcggcaatgtgttccccagcgacaaatggatggccgctggcgtgttcttcggaaagctggaacgcatcctgatcagcaagctgaccaaccagtactccatcagcaccatcgaggacgacagcagcaagcagtctatgaaaaggccggcggccacgaaaaaggccggccaggcaaaaaagaaaaagggatcctacccatacgatgttccagattacgcttatccctacgacgtgcctgattatgcatacccatatgatgtccccgactatgcctaa

SEQ ID NO: 7 - protein, 1361 aa, synthetic construct
  REGION 1..1361: note = BhCas12b GGSGGS-ABE8-Xten20at D306 polypeptide sequence
MAPKKKRKVGIHGVPAAATRSFILKIEPNEEVKKGLWKTHEVLNHGIAYYMNILKLIRQEAIYEHHEQDPKNPKKVSKAEIQAELWDFVLKMQKCNSFTHEVDKDEVFNILRELYEELVPSSVEKKGEANQLSNKFLYPLVDPNSQSGKGTASSGRKPRWYNLKIAGDPSWEEEKKKWEEDKKKDPLAKILGKLAEYGLIPLFIPYTDSNEPIVKEIKWMEKSRNQSVRRLDKDMFIQALERFLSWESWNLKVKEEYEKVEKEYKTLEERIKEDIQALKALEQYEKERQEQLLRDTLNTNEYRLSKRGLRGWREIIQKWLKMDGGSGGSSEVEFSHEYWMRHALTLAKRARDEREVPVGAVLVLNNRVIGEGWNRAIGLHDPTAHAEIMALRQGGLVMQNYRLYDATLYVTFEPCVMCAGAMIHSRIGRVVFGVRNAKTGAAGSLMDVLHHPGMNHRVEITEGILADECAALLCRFFRMPRRVFNAQKKAQSSTDGSSGSETPGTSESATPESSGENEPSEKYLEVFKDYQRKHPREAGDYSVYEFLSKKENHFIWRNHPEYPYLYATFCEIDKKKKDAKQQATFTLADPINHPLWVRFEERSGSNLNKYRILTEQLHTEKLKKKLTVQLDRLIYPTESGGWEEKGKVDIVLLPSRQFYNQIFLDIEEKGKHAFTYKDESIKFPLKGTLGGARVQFDRDHLRRYPHKVESGNVGRIYFNMTVNIEPTESPVSKSLKIHRDDFPKVVNFKPKELTEWIKDSKGKKLKSGIESLEIGLRVMSIDLGQRQAAAASIFEVVDQKPDIEGKLFFPIKGTELYAVHRASFNIKLPGETLVKSREVLRKAREDNLKLMNQKLNFLRNVLHFQQFEDITEREKRVTKWISRQENSDVPLVYQDELIQIRELMYKPYKDWVAFLKQLHKRLEVEIGKEVKHWRKSLSDGRKGLYGISLKNIDEIDRTRKFLLRWSLRPTEPGEVRRLEPGQRFAIDQLNHLNALKEDRLKKMANTIIMHALGYCYDVRKKKWQAKNPACQIILFEDLSNYNPYEERSRFENSKLMKWSRREIPRQVALQGEIYGLQVGEVGAQFSSRFHAKTGSPGIRCSVVTKEKLQDNRFFKNLQREGRLTLDKIAVLKEGDLYPDKGGEKFISLSKDRKCVTTHADINAAQNLQKRFWTRTHGFYKVYCKAYQVDGQTVYIPESKDQKQKIIEEFGEGYFILKDGVYEWVNAGKLKIKKGSSKQSSSELVDSDILKDSFDLASELKGEKLMLYRDPSGNVFPSDKWMAAGVFFGKLERILISKLTNQYSISTIEDDSSKQSMKRPAATKKAGQAKKKKGSYPYDVPDYAYPYDVPDYAYPYDVPDYA

SEQ ID NO: 8 - DNA, 4092 bp, synthetic construct
  misc_feature 1..4092: note = BhCas12b GGSGGS-ABE8-Xten20at D980 polynucleotide sequence
  misc_feature 1..6: note = Kozak sequence
  misc_feature 7..57: note = Sequence encoding N-terminal nuclear localization signal (NLS)
  misc_feature 58..2997: note = Sequence encoding BhCas12b
  misc_feature 2998..3015: note = Sequence encoding a linker
  misc_feature 3016..3513: note = Sequence encoding TadA*8
  misc_feature 3514..3573: note = Sequence encoding Xten20 linker
  misc_feature 3574..3954: note = Sequence encoding BhCas12b
  misc_feature 3955..4002: note = Sequence encoding C-terminal NLS
  misc_feature 4003..4008: note = Sequence encoding a GS linker
  misc_feature 4009..4089: note = Sequence encoding 3x hemagglutinin (HA) tag
  source 1..4092: mol_type = other DNA
gccaccatggccccaaagaagaagcggaaggtcggtatccacggagtcccagcagccgccaccagatccttcatcctgaagatcgagcccaacgaggaagtgaagaaaggcctctggaaaacccacgaggtgctgaaccacggaatcgcctactacatgaatatcctgaagctgatccggcaagaggccatctacgagcaccacgagcaggaccccaagaatcccaagaaggtgtccaaggccgagatccaggccgagctgtgggatttcgtgctgaagatgcagaagtgcaacagcttcacacacgaggtggacaaggacgaggtgttcaacatcctgagagagctgtacgaggaactggtgcccagcagcgtggaaaagaagggcgaagccaaccagctgagcaacaagtttctgtaccctctggtggaccccaacagccagtctggaaagggaacagccagcagcggcagaaagcccagatggtacaacctgaagattgccggcgatccctcctgggaagaagagaagaagaagtgggaagaagataagaaaaaggacccgctggccaagatcctgggcaagctggctgagtacggactgatccctctgttcatcccctacaccgacagcaacgagcccatcgtgaaagaaatcaagtggatggaaaagtcccggaaccagagcgtgcggcggctggataaggacatgttcattcaggccctggaacggttcctgagctgggagagctggaacctgaaagtgaaagaggaatacgagaaggtcgagaaagagtacaagaccctggaagagaggatcaaagaggacatccaggctctgaaggctctggaacagtatgagaaagagcggcaagaacagctgctgcgggacaccctgaacaccaacgagtaccggctgagcaagagaggccttagaggctggcgggaaatcatccagaaatggctgaaaatggacgagaacgagccctccgagaagtacctggaagtgttcaaggactaccagcggaagcaccctagagaggccggcgattacagcgtgtacgagttcctgtccaagaaagagaaccacttcatctggcggaatcaccctgagtacccctacctgtacgccaccttctgcgagatcgacaagaaaaagaaggacgccaagcagcaggccaccttcacactggccgatcctatcaatcaccctctgtgggtccgattcgaggaaagaagcggcagcaacctgaacaagtacagaatcctgaccgagcagctgcacaccgagaagctgaagaaaaagctgacagtgcagctggaccggctgatctaccctacagaatctggcggctgggaagagaagggcaaagtggacattgtgctgctgcccagccggcagttctacaaccagatcttcctggacatcgaggaaaagggcaagcacgccttcacctacaaggatgagagcatcaagttccctctgaagggcacactcggcggagccagagtgcagttcgacagagatcacctgagaagataccctcacaaggtggaaagcggcaacgtgggcagaatctacttcaacatgaccgtgaacatcgagcctacagagtccccagtgtccaagtctctgaagatccaccgggacgacttccccaaggtggtcaacttcaagcccaaagaactgaccgagtggatcaaggacagcaagggcaagaaactgaagtccggcatcgagtccctggaaatcggcctgagagtgatgagcatcgacctgggacagagacaggccgctgccgcctctattttcgaggtggtggatcagaagcccgacatcgaaggcaagctgtttttcccaatcaagggcaccgagctgtatgccgtgcacagagccagcttcaacatcaagctgcccggcgagacactggtcaagagcagagaagtgctgcggaaggccagagaggacaatctgaaactgatgaaccagaagctcaacttcctgcggaacgtgctgcacttccagcagttcgaggacatcaccgagagagagaagcgggtcaccaagtggatcagcagacaagagaacagcgacgtgcccctggtgtaccaggatgagctgatccagatccgcgagctgatgtacaagccttacaaggactgggtcgccttcctgaagcagctccacaagagactggaagtcgagatcggcaaagaagtgaagcactggcggaagtccctgagcgacggaagaaagggcctgtacggcatctccctgaagaacatcgacgagatcgatcggacccggaagttcctgctgagatggtccctgaggcctaccgaacctggcgaagtgcgtagactggaacccggccagagattcgccatcgaccagctgaatcacctgaacgccctgaaagaagatcggctgaagaagatggccaacaccatcatcatgcacgccctgggctactgctacgacgtgcggaagaagaaatggcaggctaagaaccccgcctgccagatcatcctgttcgaggatctgagcaactacaacccctacgaggaaaggtcccgcttcgagaacagcaagctcatgaagtggtccagacgcgagatccccagacaggttgcactgcagggcgagatctatggcctgcaagtgggagaagtgggcgctcagttcagcagcagattccacgccaagacaggcagccctggcatcagatgtagcgtcgtgaccaaagagaagctgcaggacaatcggttcttcaagaatctgcagagagagggcagactgaccctggacaaaatcgccgtgctgaaagagggcgatctgtacccagacaaaggcggcgagaagttcatcagcctgagcaaggatcggaagtgcgtgaccacacacgccgacatcaacgccgctcagaacctgcagaagcggttctggacaagaacccacggcttctacaaggtgtactgcaaggcctaccaggtggacggaggctctggaggaagctccgaagtcgagttttcccatgagtactggatgagacacgcattgactctcgcaaagagggctcgagatgaacgcgaggtgcccgtgggggcagtactcgtgctcaacaatcgcgtaatcggcgaaggttggaatagggcaatcggactccacgaccccactgcacatgcggaaatcatggcccttcgacagggagggcttgtgatgcagaattatcgactttatgatgcgacgctgtacgtcacgtttgaaccttgcgtaatgtgcgcgggagctatgattcactcccgcattggacgagttgtattcggtgttcgcaacgccaagacgggtgccgcaggttcactgatggacgtgctgcatcatccaggcatgaaccaccgggtagaaatcacagaaggcatattggcggacgaatgtgcggcgctgttgtgtcgtttttttcgcatgcccaggcgggtctttaacgcccagaaaaaagcacaatcctctactgacggctcttctggatctgaaacacctggcacaagcgagagcgccacccctgagagctctggcggccagaccgtgtacatccctgagagcaaggaccagaagcagaagatcatcgaagagttcggcgagggctacttcattctgaaggacggggtgtacgaatgggtcaacgccggcaagctgaaaatcaagaagggcagctccaagcagagcagcagcgagctggtggatagcgacatcctgaaagacagcttcgacctggcctccgagctgaaaggcgaaaagctgatgctgtacagggaccccagcggcaatgtgttccccagcgacaaatggatggccgctggcgtgttcttcggaaagctggaacgcatcctgatcagcaagctgaccaaccagtactccatcagcaccatcgaggacgacagcagcaagcagtctatgaaaaggccggcggccacgaaaaaggccggccaggcaaaaaagaaaaagggatcctacccatacgatgttccagattacgcttatccctacgacgtgcctgattatgcatacccatatgatgtccccgactatgcctaa

SEQ ID NO: 9 - protein, 1361 aa, synthetic construct
  REGION 1..1361: note = BhCas12b GGSGGS-ABE8-Xten20at D980 polypeptide sequence
MAPKKKRKVGIHGVPAAATRSFILKIEPNEEVKKGLWKTHEVLNHGIAYYMNILKLIRQEAIYEHHEQDPKNPKKVSKAEIQAELWDFVLKMQKCNSFTHEVDKDEVFNILRELYEELVPSSVEKKGEANQLSNKFLYPLVDPNSQSGKGTASSGRKPRWYNLKIAGDPSWEEEKKKWEEDKKKDPLAKILGKLAEYGLIPLFIPYTDSNEPIVKEIKWMEKSRNQSVRRLDKDMFIQALERFLSWESWNLKVKEEYEKVEKEYKTLEERIKEDIQALKALEQYEKERQEQLLRDTLNTNEYRLSKRGLRGWREIIQKWLKMDENEPSEKYLEVFKDYQRKHPREAGDYSVYEFLSKKENHFIWRNHPEYPYLYATFCEIDKKKKDAKQQATFTLADPINHPLWVRFEERSGSNLNKYRILTEQLHTEKLKKKLTVQLDRLIYPTESGGWEEKGKVDIVLLPSRQFYNQIFLDIEEKGKHAFTYKDESIKFPLKGTLGGARVQFDRDHLRRYPHKVESGNVGRIYFNMTVNIEPTESPVSKSLKIHRDDFPKVVNFKPKELTEWIKDSKGKKLKSGIESLEIGLRVMSIDLGQRQAAAASIFEVVDQKPDIEGKLFFPIKGTELYAVHRASFNIKLPGETLVKSREVLRKAREDNLKLMNQKLNFLRNVLHFQQFEDITEREKRVTKWISRQENSDVPLVYQDELIQIRELMYKPYKDWVAFLKQLHKRLEVEIGKEVKHWRKSLSDGRKGLYGISLKNIDEIDRTRKFLLRWSLRPTEPGEVRRLEPGQRFAIDQLNHLNALKEDRLKKMANTIIMHALGYCYDVRKKKWQAKNPACQIILFEDLSNYNPYEERSRFENSKLMKWSRREIPRQVALQGEIYGLQVGEVGAQFSSRFHAKTGSPGIRCSVVTKEKLQDNRFFKNLQREGRLTLDKIAVLKEGDLYPDKGGEKFISLSKDRKCVTTHADINAAQNLQKRFWTRTHGFYKVYCKAYQVDGGSGGSSEVEFSHEYWMRHALTLAKRARDEREVPVGAVLVLNNRVIGEGWNRAIGLHDPTAHAEIMALRQGGLVMQNYRLYDATLYVTFEPCVMCAGAMIHSRIGRVVFGVRNAKTGAAGSLMDVLHHPGMNHRVEITEGILADECAALLCRFFRMPRRVFNAQKKAQSSTDGSSGSETPGTSESATPESSGGQTVYIPESKDQKQKIIEEFGEGYFILKDGVYEWVNAGKLKIKKGSSKQSSSELVDSDILKDSFDLASELKGEKLMLYRDPSGNVFPSDKWMAAGVFFGKLERILISKLTNQYSISTIEDDSSKQSMKRPAATKKAGQAKKKKGSYPYDVPDYAYPYDVPDYAYPYDVPDYA

SEQ ID NO: 10 - DNA, 4092 bp, synthetic construct
  misc_feature 1..4092: note = BhCas12b GGSGGS-ABE8-Xten20at K1019 polynucleotide sequence
  misc_feature 1..6: note = Kozak sequence
  misc_feature 7..57: note = Sequence encoding N-terminal nuclear localization signal (NLS)
  misc_feature 58..3114: note = Sequence encoding BhCas12b
  misc_feature 3115..3132: note = Sequence encoding a linker
  misc_feature 3133..3630: note = Sequence encoding TadA*8
  misc_feature 3631..3690: note = Sequence encoding Xten20 linker
  misc_feature 3691..3954: note = Sequence encoding BhCas12b
  misc_feature 3955..4002: note = Sequence encoding C-terminal NLS
  misc_feature 4003..4008: note = Sequence encoding GS linker
  misc_feature 4009..4089: note = Sequence encoding 3x hemagglutinin (HA) tag
  source 1..4092: mol_type = other DNA
gccaccatggccccaaagaagaagcggaaggtcggtatccacggagtcccagcagccgccaccagatccttcatcctgaagatcgagcccaacgaggaagtgaagaaaggcctctggaaaacccacgaggtgctgaaccacggaatcgcctactacatgaatatcctgaagctgatccggcaagaggccatctacgagcaccacgagcaggaccccaagaatcccaagaaggtgtccaaggccgagatccaggccgagctgtgggatttcgtgctgaagatgcagaagtgcaacagcttcacacacgaggtggacaaggacgaggtgttcaacatcctgagagagctgtacgaggaactggtgcccagcagcgtggaaaagaagggcgaagccaaccagctgagcaacaagtttctgtaccctctggtggaccccaacagccagtctggaaagggaacagccagcagcggcagaaagcccagatggtacaacctgaagattgccggcgatccctcctgggaagaagagaagaagaagtgggaagaagataagaaaaaggacccgctggccaagatcctgggcaagctggctgagtacggactgatccctctgttcatcccctacaccgacagcaacgagcccatcgtgaaagaaatcaagtggatggaaaagtcccggaaccagagcgtgcggcggctggataaggacatgttcattcaggccctggaacggttcctgagctgggagagctggaacctgaaagtgaaagaggaatacgagaaggtcgagaaagagtacaagaccctggaagagaggatcaaagaggacatccaggctctgaaggctctggaacagtatgagaaagagcggcaagaacagctgctgcgggacaccctgaacaccaacgagtaccggctgagcaagagaggccttagaggctggcgggaaatcatccagaaatggctgaaaatggacgagaacgagccctccgagaagtacctggaagtgttcaaggactaccagcggaagcaccctagagaggccggcgattacagcgtgtacgagttcctgtccaagaaagagaaccacttcatctggcggaatcaccctgagtacccctacctgtacgccaccttctgcgagatcgacaagaaaaagaaggacgccaagcagcaggccaccttcacactggccgatcctatcaatcaccctctgtgggtccgattcgaggaaagaagcggcagcaacctgaacaagtacagaatcctgaccgagcagctgcacaccgagaagctgaagaaaaagctgacagtgcagctggaccggctgatctaccctacagaatctggcggctgggaagagaagggcaaagtggacattgtgctgctgcccagccggcagttctacaaccagatcttcctggacatcgaggaaaagggcaagcacgccttcacctacaaggatgagagcatcaagttccctctgaagggcacactcggcggagccagagtgcagttcgacagagatcacctgagaagataccctcacaaggtggaaagcggcaacgtgggcagaatctacttcaacatgaccgtgaacatcgagcctacagagtccccagtgtccaagtctctgaagatccaccgggacgacttccccaaggtggtcaacttcaagcccaaagaactgaccgagtggatcaaggacagcaagggcaagaaactgaagtccggcatcgagtccctggaaatcggcctgagagtgatgagcatcgacctgggacagagacaggccgctgccgcctctattttcgaggtggtggatcagaagcccgacatcgaaggcaagctgtttttcccaatcaagggcaccgagctgtatgccgtgcacagagccagcttcaacatcaagctgcccggcgagacactggtcaagagcagagaagtgctgcggaaggccagagaggacaatctgaaactgatgaaccagaagctcaacttcctgcggaacgtgctgcacttccagcagttcgaggacatcaccgagagagagaagcgggtcaccaagtggatcagcagacaagagaacagcgacgtgcccctggtgtaccaggatgagctgatccagatccgcgagctgatgtacaagccttacaaggactgggtcgccttcctgaagcagctccacaagagactggaagtcgagatcggcaaagaagtgaagcactggcggaagtccctgagcgacggaagaaagggcctgtacggcatctccctgaagaacatcgacgagatcgatcggacccggaagttcctgctgagatggtccctgaggcctaccgaacctggcgaagtgcgtagactggaacccggccagagattcgccatcgaccagctgaatcacctgaacgccctgaaagaagatcggctgaagaagatggccaacaccatcatcatgcacgccctgggctactgctacgacgtgcggaagaagaaatggcaggctaagaaccccgcctgccagatcatcctgttcgaggatctgagcaactacaacccctacgaggaaaggtcccgcttcgagaacagcaagctcatgaagtggtccagacgcgagatccccagacaggttgcactgcagggcgagatctatggcctgcaagtgggagaagtgggcgctcagttcagcagcagattccacgccaagacaggcagccctggcatcagatgtagcgtcgtgaccaaagagaagctgcaggacaatcggttcttcaagaatctgcagagagagggcagactgaccctggacaaaatcgccgtgctgaaagagggcgatctgtacccagacaaaggcggcgagaagttcatcagcctgagcaaggatcggaagtgcgtgaccacacacgccgacatcaacgccgctcagaacctgcagaagcggttctggacaagaacccacggcttctacaaggtgtactgcaaggcctaccaggtggacggccagaccgtgtacatccctgagagcaaggaccagaagcagaagatcatcgaagagttcggcgagggctacttcattctgaaggacggggtgtacgaatgggtcaacgccggcaagggaggctctggaggaagctccgaagtcgagttttcccatgagtactggatgagacacgcattgactctcgcaaagagggctcgagatgaacgcgaggtgcccgtgggggcagtactcgtgctcaacaatcgcgtaatcggcgaaggttggaatagggcaatcggactccacgaccccactgcacatgcggaaatcatggcccttcgacagggagggcttgtgatgcagaattatcgactttatgatgcgacgctgtacgtcacgtttgaaccttgcgtaatgtgcgcgggagctatgattcactcccgcattggacgagttgtattcggtgttcgcaacgccaagacgggtgccgcaggttcactgatggacgtgctgcatcatccaggcatgaaccaccgggtagaaatcacagaaggcatattggcggacgaatgtgcggcgctgttgtgtcgtttttttcgcatgcccaggcgggtctttaacgcccagaaaaaagcacaatcctctactgacggctcttctggatctgaaacacctggcacaagcgagagcgccacccctgagagctctggcctgaaaatcaagaagggcagctccaagcagagcagcagcgagctggtggatagcgacatcctgaaagacagcttcgacctggcctccgagctgaaaggcgaaaagctgatgctgtacagggaccccagcggcaatgtgttccccagcgacaaatggatggccgctggcgtgttcttcggaaagctggaacgcatcctgatcagcaagctgaccaaccagtactccatcagcaccatcgaggacgacagcagcaagcagtctatgaaaaggccggcggccacgaaaaaggccggccaggcaaaaaagaaaaagggatcctacccatacgatgttccagattacgcttatccctacgacgtgcctgattatgcatacccatatgatgtccccgactatgcctaa

SEQ ID NO: 11 - protein, 1361 aa, synthetic construct
  REGION 1..1361: note = BhCas12b GGSGGS-ABE8-Xten20at K1019 polypeptide sequence
MAPKKKRKVGIHGVPAAATRSFILKIEPNEEVKKGLWKTHEVLNHGIAYYMNILKLIRQEAIYEHHEQDPKNPKKVSKAEIQAELWDFVLKMQKCNSFTHEVDKDEVFNILRELYEELVPSSVEKKGEANQLSNKFLYPLVDPNSQSGKGTASSGRKPRWYNLKIAGDPSWEEEKKKWEEDKKKDPLAKILGKLAEYGLIPLFIPYTDSNEPIVKEIKWMEKSRNQSVRRLDKDMFIQALERFLSWESWNLKVKEEYEKVEKEYKTLEERIKEDIQALKALEQYEKERQEQLLRDTLNTNEYRLSKRGLRGWREIIQKWLKMDENEPSEKYLEVFKDYQRKHPREAGDYSVYEFLSKKENHFIWRNHPEYPYLYATFCEIDKKKKDAKQQATFTLADPINHPLWVRFEERSGSNLNKYRILTEQLHTEKLKKKLTVQLDRLIYPTESGGWEEKGKVDIVLLPSRQFYNQIFLDIEEKGKHAFTYKDESIKFPLKGTLGGARVQFDRDHLRRYPHKVESGNVGRIYFNMTVNIEPTESPVSKSLKIHRDDFPKVVNFKPKELTEWIKDSKGKKLKSGIESLEIGLRVMSIDLGQRQAAAASIFEVVDQKPDIEGKLFFPIKGTELYAVHRASFNIKLPGETLVKSREVLRKAREDNLKLMNQKLNFLRNVLHFQQFEDITEREKRVTKWISRQENSDVPLVYQDELIQIRELMYKPYKDWVAFLKQLHKRLEVEIGKEVKHWRKSLSDGRKGLYGISLKNIDEIDRTRKFLLRWSLRPTEPGEVRRLEPGQRFAIDQLNHLNALKEDRLKKMANTIIMHALGYCYDVRKKKWQAKNPACQIILFEDLSNYNPYEERSRFENSKLMKWSRREIPRQVALQGEIYGLQVGEVGAQFSSRFHAKTGSPGIRCSVVTKEKLQDNRFFKNLQREGRLTLDKIAVLKEGDLYPDKGGEKFISLSKDRKCVTTHADINAAQNLQKRFWTRTHGFYKVYCKAYQVDGQTVYIPESKDQKQKIIEEFGEGYFILKDGVYEWVNAGKGGSGGSSEVEFSHEYWMRHALTLAKRARDEREVPVGAVLVLNNRVIGEGWNRAIGLHDPTAHAEIMALRQGGLVMQNYRLYDATLYVTFEPCVMCAGAMIHSRIGRVVFGVRNAKTGAAGSLMDVLHHPGMNHRVEITEGILADECAALLCRFFRMPRRVFNAQKKAQSSTDGSSGSETPGTSESATPESSGLKIKKGSSKQSSSELVDSDILKDSFDLASELKGEKLMLYRDPSGNVFPSDKWMAAGVFFGKLERILISKLTNQYSISTIEDDSSKQSMKRPAATKKAGQAKKKKGSYPYDVPDYAYPYDVPDYAYPYDVPDYA

SEQ ID NO: 12 - protein, 208 aa, Petromyzon marinus
  REGION 1..208: note = MISC_FEATURE - tr|A5H718|A5H718_PETMA Cytosine deaminase OS=Petromyzon marinusOX=7757 PE=2 SV=1 amino acid sequence; PmCDA1 polypeptide sequence
MTDAEYVRIHEKLDIYTFKKQFFNNKKSVSHRCYVLFELKRRGERRACFWGYAVNKPQSGTERGIHAEIFSIRKVEEYLRDNPGQFTINWYSSWSPCADCAEKILEWYNQELRGNGHTLKIWACKLYYEKNARNQIGLWNLRDNGVGLNVMVSEHYQCCRKIFIQSSHNQLNENRWLEKTLKRAEKRRSELSIMIQVKILHTTKSPAV

SEQ ID NO: 13 - DNA, 766 bp, Petromyzon marinus
  misc_feature 1..766: note = EF094822.1 Petromyzon marinus isolate PmCDA.21 cytosine deaminase mRNA, complete cds; PmCDA1 polynucleotide sequence
  source 1..766: mol_type = genomic DNA
tgacacgacacagccgtgtatatgaggaagggtagctggatggggggggggggaatacgttcagagaggacattagcgagcgtcttgttggtggccttgagtctagacacctgcagacatgaccgacgctgagtacgtgagaatccatgagaagttggacatctacacgtttaagaaacagtttttcaacaacaaaaaatccgtgtcgcatagatgctacgttctctttgaattaaaacgacggggtgaacgtagagcgtgtttttggggctatgctgtgaataaaccacagagcgggacagaacgtggaattcacgccgaaatctttagcattagaaaagtcgaagaatacctgcgcgacaaccccggacaattcacgataaattggtactcatcctggagtccttgtgcagattgcgctgaaaagatcttagaatggtataaccaggagctgcgggggaacggccacactttgaaaatctgggcttgcaaactctattacgagaaaaatgcgaggaatcaaattgggctgtggaacctcagagataacggggttgggttgaatgtaatggtaagtgaacactaccaatgttgcaggaaaatattcatccaatcgtcgcacaatcaattgaatgagaatagatggcttgagaagactttgaagcgagctgaaaaacgacggagcgagttgtccattatgattcaggtaaaaatactccacaccactaagagtcctgctgtttaagaggctatgcggatggttttc

SEQ ID NO: 14 - protein, 145 aa, Homo sapiens
  REGION 1..145: note = MISC_FEATURE - tr|Q6QJ80|Q6QJ80_HUMAN Activation-induced cytidine deaminase OS=Homo sapiens; OX = 9606 GN=AICDA PE=2 SV=1; AID polypeptide sequence
MDSLLMNRRKFLYQFKNVRWAKGRRETYLCYVVKRRDSATSFSLDFGYLRNKNGCHVELLFLRYISDWDLDPGRCYRVTWFTSWSPCYDCARHVADFLRGNPNLSLRIFTARLYFCEDRKAEPEGLRRLHRAGVQIAIMTFKAPV

SEQ ID NO: 15 - DNA, 10681 bp, Homo sapiens
  misc_feature 1..10681: note = NG_011588.1:5001-15681 Homo sapiens activation induced cytidine deaminase (AICDA), RefSeqGene (LRG_17) on chromosome 12; nucleic acid sequence of the CDS of human AID; polynucleotide sequence
  source 1..10681: mol_type = genomic DNA
agagaaccatcattaattgaagtgagatttttctggcctgagacttgcagggaggcaagaagacactctggacaccactatggacaggtaaagaggcagtcttctcgtgggtgattgcactggccttcctctcagagcaaatctgagtaatgagactggtagctatccctttctctcatgtaactgtctgactgataagatcagcttgatcaatatgcatatatattttttgatctgtctccttttcttctattcagatcttatacgctgtcagcccaattctttctgtttcagacttctcttgatttccctctttttcatgtggcaaaagaagtagtgcgtacaatgtactgattcgtcctgagatttgtaccatggttgaaactaatttatggtaataatattaacatagcaaatctttagagactcaaatcatgaaaaggtaatagcagtactgtactaaaaacggtagtgctaattttcgtaataattttgtaaatattcaacagtaaaacaacttgaagacacactttcctagggaggcgttactgaaataatttagctatagtaagaaaatttgtaattttagaaatgccaagcattctaaattaattgcttgaaagtcactatgattgtgtccattataaggagacaaattcattcaagcaagttatttaatgttaaaggcccaattgttaggcagttaatggcacttttactattaactaatctttccatttgttcagacgtagcttaacttacctcttaggtgtgaatttggttaaggtcctcataatgtctttatgtgcagtttttgataggttattgtcatagaacttattctattcctacatttatgattactatggatgtatgagaataacacctaatccttatactttacctcaatttaactcctttataaagaacttacattacagaataaagattttttaaaaatatatttttttgtagagacagggtcttagcccagccgaggctggtctctaagtcctggcccaagcgatcctcctgcctgggcctcctaaagtgctggaattatagacatgagccatcacatccaatatacagaataaagatttttaatggaggatttaatgttcttcagaaaattttcttgaggtcagacaatgtcaaatgtctcctcagtttacactgagattttgaaaacaagtctgagctataggtccttgtgaagggtccattggaaatacttgttcaaagtaaaatggaaagcaaaggtaaaatcagcagttgaaattcagagaaagacagaaaaggagaaaagatgaaattcaacaggacagaagggaaatatattatcattaaggaggacagtatctgtagagctcattagtgatggcaaaatgacttggtcaggattatttttaacccgcttgtttctggtttgcacggctggggatgcagctagggttctgcctcagggagcacagctgtccagagcagctgtcagcctgcaagcctgaaacactccctcggtaaagtccttcctactcaggacagaaatgacgagaacagggagctggaaacaggcccctaaccagagaagggaagtaatggatcaacaaagttaactagcaggtcaggatcacgcaattcatttcactctgactggtaacatgtgacagaaacagtgtaggcttattgtattttcatgtagagtaggacccaaaaatccacccaaagtcctttatctatgccacatccttcttatctatacttccaggacactttttcttccttatgataaggctctctctctctccacacacacacacacacacacacacacacacacacacacacacacaaacacacaccccgccaaccaaggtgcatgtaaaaagatgtagattcctctgcctttctcatctacacagcccaggagggtaagttaatataagagggatttattggtaagagatgatgcttaatctgtttaacactgggcctcaaagagagaatttcttttcttctgtacttattaagcacctattatgtgttgagcttatatatacaaagggttattatatgctaatatagtaatagtaatggtggttggtactatggtaattaccataaaaattattatccttttaaaataaagctaattattattggatcttttttagtattcattttatgttttttatgtttttgattttttaaaagacaatctcaccctgttacccaggctggagtgcagtggtgcaatcatagctttctgcagtcttgaactcctgggctcaagcaatcctcctgccttggcctcccaaagtgttgggatacagtcatgagccactgcatctggcctaggatccatttagattaaaatatgcattttaaattttaaaataatatggctaatttttaccttatgtaatgtgtatactggcaataaatctagtttgctgcctaaagtttaaagtgctttccagtaagcttcatgtacgtgaggggagacatttaaagtgaaacagacagccaggtgtggtggctcacgcctgtaatcccagcactctgggaggctgaggtgggtggatcgcttgagccctggagttcaagaccagcctgagcaacatggcaaaacgctgtttctataacaaaaattagccgggcatggtggcatgtgcctgtggtcccagctactagggggctgaggcaggagaatcgttggagcccaggaggtcaaggctgcactgagcagtgcttgcgccactgcactccagcctgggtgacaggaccagaccttgcctcaaaaaaataagaagaaaaattaaaaataaatggaaacaactacaaagagctgttgtcctagatgagctacttagttaggctgatattttggtatttaacttttaaagtcagggtctgtcacctgcactacattattaaaatatcaattctcaatgtatatccacacaaagactggtacgtgaatgttcatagtacctttattcacaaaaccccaaagtagagactatccaaatatccatcaacaagtgaacaaataaacaaaatgtgctatatccatgcaatggaataccaccctgcagtacaaagaagctacttggggatgaatcccaaagtcatgacgctaaatgaaagagtcagacatgaaggaggagataatgtatgccatacgaaattctagaaaatgaaagtaacttatagttacagaaagcaaatcagggcaggcatagaggctcacacctgtaatcccagcactttgagaggccacgtgggaagattgctagaactcaggagttcaagaccagcctgggcaacacagtgaaactccattctccacaaaaatgggaaaaaaagaaagcaaatcagtggttgtcctgtggggaggggaaggactgcaaagagggaagaagctctggtggggtgagggtggtgattcaggttctgtatcctgactgtggtagcagtttggggtgtttacatccaaaaatattcgtagaattatgcatcttaaatgggtggagtttactgtatgtaaattatacctcaatgtaagaaaaaataatgtgtaagaaaactttcaattctcttgccagcaaacgttattcaaattcctgagccctttacttcgcaaattctctgcacttctgccccgtaccattaggtgacagcactagctccacaaattggataaatgcatttctggaaaagactagggacaaaatccaggcatcacttgtgctttcatatcaaccatgctgtacagcttgtgttgctgtctgcagctgcaatggggactcttgatttctttaaggaaacttgggttaccagagtatttccacaaatgctattcaaattagtgcttatgatatgcaagacactgtgctaggagccagaaaacaaagaggaggagaaatcagtcattatgtgggaacaacatagcaagatatttagatcattttgactagttaaaaaagcagcagagtacaaaatcacacatgcaatcagtataatccaaatcatgtaaatatgtgcctgtagaaagactagaggaataaacacaagaatcttaacagtcattgtcattagacactaagtctaattattattattagacactatgatatttgagatttaaaaaatctttaatattttaaaatttagagctcttctatttttccatagtattcaagtttgacaatgatcaagtattactctttctttttttttttttttttttttttttgagatggagttttggtcttgttgcccatgctggagtggaatggcatgaccatagctcactgcaacctccacctcctgggttcaagcaaagctgtcgcctcagcctcccgggtagatgggattacaggcgcccaccaccacactcggctaatgtttgtatttttagtagagatggggtttcaccatgttggccaggctggtctcaaactcctgacctcagaggatccacctgcctcagcctcccaaagtgctgggattacagatgtaggccactgcgcccggccaagtattgctcttatacattaaaaaacaggtgtgagccactgcgcccagccaggtattgctcttatacattaaaaaataggccggtgcagtggctcacgcctgtaatcccagcactttgggaagccaaggcgggcagaacacccgaggtcaggagtccaaggccagcctggccaagatggtgaaaccccgtctctattaaaaatacaaacattacctgggcatgatggtgggcgcctgtaatcccagctactcaggaggctgaggcaggaggatccgcggagcctggcagatctgcctgagcctgggaggttgaggctacagtaagccaagatcatgccagtatacttcagcctgggcgacaaagtgagaccgtaacaaaaaaaaaaaaatttaaaaaaagaaatttagatcaagatccaactgtaaaaagtggcctaaacaccacattaaagagtttggagtttattctgcaggcagaagagaaccatcagggggtcttcagcatgggaatggcatggtgcacctggtttttgtgagatcatggtggtgacagtgtggggaatgttattttggagggactggaggcagacagaccggttaaaaggccagcacaacagataaggaggaagaagatgagggcttggaccgaagcagagaagagcaaacagggaaggtacaaattcaagaaatattggggggtttgaatcaacacatttagatgattaattaaatatgaggactgaggaataagaaatgagtcaaggatggttccaggctgctaggctgcttacctgaggtggcaaagtcgggaggagtggcagtttaggacagggggcagttgaggaatattgttttgatcattttgagtttgaggtacaagttggacacttaggtaaagactggaggggaaatctgaatatacaattatgggactgaggaacaagtttattttattttttgtttcgttttcttgttgaagaacaaatttaattgtaatcccaagtcatcagcatctagaagacagtggcaggaggtgactgtcttgtgggtaagggtttggggtccttgatgagtatctctcaattggccttaaatataagcaggaaaaggagtttatgatggattccaggctcagcagggctcaggagggctcaggcagccagcagaggaagtcagagcatcttctttggtttagcccaagtaatgacttccttaaaaagctgaaggaaaatccagagtgaccagattataaactgtactcttgcattttctctccctcctctcacccacagcctcttgatgaaccggaggaagtttctttaccaattcaaaaatgtccgctgggctaagggtcggcgtgagacctacctgtgctacgtagtgaagaggcgtgacagtgctacatccttttcactggactttggttatcttcgcaataaggtatcaattaaagtcggctttgcaagcagtttaatggtcaactgtgagtgcttttagagccacctgctgatggtattacttccatccttttttggcatttgtgtctctatcacattcctcaaatccttttttttatttctttttccatgtccatgcacccatattagacatggcccaaaatatgtgatttaattcctccccagtaatgctgggcaccctaataccactccttccttcagtgccaagaacaactgctcccaaactgtttaccagctttcctcagcatctgaattgcctttgagattaattaagctaaaagcatttttatatgggagaatattatcagcttgtccaagcaaaaattttaaatgtgaaaaacaaattgtgtcttaagcatttttgaaaattaaggaagaagaatttgggaaaaaattaacggtggctcaattctgtcttccaaatgatttcttttccctcctactcacatgggtcgtaggccagtgaatacattcaacatggtgatccccagaaaactcagagaagcctcggctgatgattaattaaattgatctttcggctacccgagagaattacatttccaagagacttcttcaccaaaatccagatgggtttacataaacttctgcccacgggtatctcctctctcctaacacgctgtgacgtctgggcttggtggaatctcagggaagcatccgtggggtggaaggtcatcgtctggctcgttgtttgatggttatattaccatgcaattttctttgcctacatttgtattgaatacatcccaatctccttcctattcggtgacatgacacattctatttcagaaggctttgattttatcaagcactttcatttacttctcatggcagtgcctattacttctcttacaatacccatctgtctgctttaccaaaatctatttccccttttcagatcctcccaaatggtcctcataaactgtcctgcctccacctagtggtccaggtatatttccacaatgttacatcaacaggcacttctagccattttccttctcaaaaggtgcaaaaagcaacttcataaacacaaattaaatcttcggtgaggtagtgtgatgctgcttcctcccaactcagcgcacttcgtcttcctcattccacaaaaacccatagccttccttcactctgcaggactagtgctgccaagggttcagctctacctactggtgtgctcttttgagcaagttgcttagcctctctgtaacacaaggacaatagctgcaagcatccccaaagatcattgcaggagacaatgactaaggctaccagagccgcaataaaagtcagtgaattttagcgtggtcctctctgtctctccagaacggctgccacgtggaattgctcttcctccgctacatctcggactgggacctagaccctggccgctgctaccgcgtcacctggttcacctcctggagcccctgctacgactgtgcccgacatgtggccgactttctgcgagggaaccccaacctcagtctgaggatcttcaccgcgcgcctctacttctgtgaggaccgcaaggctgagcccgaggggctgcggcggctgcaccgcgccggggtgcaaatagccatcatgaccttcaaaggtgcgaaagggccttccgcgcaggcgcagtgcagcagcccgcattcgggattgcgatgcggaatgaatgagttagtggggaagctcgaggggaagaagtgggcggggattctggttcacctctggagccgaaattaaagattagaagcagagaaaagagtgaatggctcagagacaaggccccgaggaaatgagaaaatggggccagggttgcttctttcccctcgatttggaacctgaactgtcttctacccccatatccccgcctttttttcctttttttttttttgaagattatttttactgctggaatacttttgtagaaaaccacgaaagaactttcaaagcctgggaagggctgcatgaaaattcagttcgtctctccagacagcttcggcgcatccttttggtaaggggcttcctcgctttttaaattttctttctttctctacagtcttttttggagtttcgtatatttcttatattttcttattgttcaatcactctcagttttcatctgatgaaaactttatttctcctccacatcagctttttcttctgctgtttcaccattcagagccctctgctaaggttccttttccctcccttttctttcttttgttgtttcacatctttaaatttctgtctctccccagggttgcgtttccttcctggtcagaattcttttctcctttttttttttttttttttttttttttaaacaaacaaacaaaaaacccaaaaaaactctttcccaatttactttcttccaacatgttacaaagccatccactcagtttagaagactctccggccccaccgacccccaacctcgttttgaagccattcactcaatttgcttctctctttctctacagcccctgtatgaggttgatgacttacgagacgcatttcgtactttgggactttgatagcaacttccaggaatgtcacacacgatgaaatatctctgctgaagacagtggataaaaaacagtccttcaagtcttctctgtttttattcttcaactctcactttcttagagtttacagaaaaaatatttatatacgactctttaaaaagatctatgtcttgaaaatagagaaggaacacaggtctggccagggacgtgctgcaattggtgcagttttgaatgcaacattgtcccctactgggaataacagaactgcaggacctgggagcatcctaaagtgtcaacgtttttctatgacttttaggtaggatgagagcagaaggtagatcctaaaaagcatggtgagaggatcaaatgtttttatatcaacatcctttattatttgattcatttgagttaacagtggtgttagtgatagatttttctattcttttcccttgacgtttactttcaagtaacacaaactcttccatcaggccatgatctataggacctcctaatgagagtatctgggtgattgtgaccccaaaccatctctccaaagcattaatatccaatcatgcgctgtatgttttaatcagcagaagcatgtttttatgtttgtacaaaagaagattgttatgggtggggatggaggtatagaccatgcatggtcaccttcaagctactttaataaaggatcttaaaatgggcaggaggactgtgaacaagacaccctaataatgggttgatgtctgaagtagcaaatcttctggaaacgcaaactcttttaaggaagtccctaatttagaaacacccacaaacttcacatatcataattagcaaacaattggaaggaagttgcttgaatgttggggagaggaaaatctattggctctcgtgggtctcttcatctcagaaatgccaatcaggtcaaggtttgctacattttgtatgtgtgtgatgcttctcccaaaggtatattaactatataagagagttgtgacaaaacagaatgataaagctgcgaaccgtggcacacgctcatagttctagctgcttgggaggttgaggagggaggatggcttgaacacaggtgttcaaggccagcctgggcaacataacaagatcctgtctctcaaaaaaaaaaaaaaaaaaaagaaagagagagggccgggcgtggtggctcacgcctgtaatcccagcactttgggaggccgagccgggcggatcacctgtggtcaggagtttgagaccagcctggccaacatggcaaaaccccgtctgtactcaaaatgcaaaaattagccaggcgtggtagcaggcacctgtaatcccagctacttgggaggctgaggcaggagaatcgcttgaacccaggaggtggaggttgcagtaagctgagatcgtgccgttgcactccagcctgggcgacaagagcaagactctgtctcagaaaaaaaaaaaaaaaagagagagagagagaaagagaacaatatttgggagagaaggatggggaagcattgcaaggaaattgtgctttatccaacaaaatgtaaggagccaataagggatccctatttgtctcttttggtgtctatttgtccctaacaactgtctttgacagtgagaaaaatattcagaataaccatatccctgtgccgttattacctagcaacccttgcaatgaagatgagcagatccacaggaaaacttgaatgcacaactgtcttattttaatcttattgtacataagtttgtaaaagagttaaaaattgttacttcatgtattcatttatattttatattattttgcgtctaatgattttttattaacatgatttccttttctgatatattgaaatggagtctcaaagcttcataaatttataactttagaaatgattctaataacaacgtatgtaattgtaacattgcagtaatggtgctacgaagccatttctcttgatttttagtaaacttttatgacagcaaatttgcttctggctcactttcaatcagttaaataaatgataaataattttggaagctgtgaagataaaataccaaataaaataatataaaagtgatttatatgaagttaaaataaaaaatcagtatgatggaataaacttg

SEQ ID NO: 16 - protein, 198 aa, Homo sapiens [sequence omitted]

SEQ ID NO: 17 - protein, 198 aa, Canis lupus
  REGION 1..198: note = MISC_FEATURE - Canine AID (clAID) polypeptide sequence
  REGION 1..30: note = MISC_FEATURE - Nuclear localization sequence
  REGION 183..198: note = MISC_FEATURE - Nuclear export signal
MDSLLMKQRKFLYHFKNVRWAKGRHETYLCYVVKRRDSATSFSLDFGHLRNKSGCHVELLFLRYISDWDLDPGRCYRVTWFTSWSPCYDCARHVADFLRGYPNLSLRIFAARLYFCEDRKAEPEGLRRLHRAGVQIAIMTFKDYFYCWNTFVENREKTFKAWEGLHENSVRLSRQLRRILLPLYEVDDLRDAFRTLGL

SEQ ID NO: 18 - protein, 199 aa, Bos taurus
  REGION 1..199: note = MISC_FEATURE - Bovine AID (btAID) polypeptide sequence
  REGION 1..30: note = MISC_FEATURE - Nuclear localization sequence
  REGION 183..199: note = MISC_FEATURE - Nuclear export signal
MDSLLKKQRQFLYQFKNVRWAKGRHETYLCYVVKRRDSPTSFSLDFGHLRNKAGCHVELLFLRYISDWDLDPGRCYRVTWFTSWSPCYDCARHVADFLRGYPNLSLRIFTARLYFCDKERKAEPEGLRRLHRAGVQIAIMTFKDYFYCWNTFVENHERTFKAWEGLHENSVRLSRQLRRILLPLYEVDDLRDAFRTLGL

SEQ ID NO: 19 - protein, 239 aa, Rattus sp.
  REGION 1..239: note = MISC_FEATURE - Rat AID polypeptide sequence
  REGION 1..26: note = MISC_FEATURE - Nuclear localization sequence
  REGION 194..239: note = MISC_FEATURE - Nuclear export signal
MAVGSKPKAALVGPHWERERIWCFLCSTGLGTQQTGQTSRWLRPAATQDPVSPPRSLLMKQRKFLYHFKNVRWAKGRHETYLCYVVKRRDSATSFSLDFGYLRNKSGCHVELLFLRYISDWDLDPGRCYRVTWFTSWSPCYDCARHVADFLRGNPNLSLRIFTARLTGWGALPAGLMSPARPSDYFYCWNTFVENHERTFKAWEGLHENSVRLSRRLRRILLPLYEVDDLRDAFRTLGL

SEQ ID NO: 20 - protein, 198 aa, Mus musculus [sequence omitted]

SEQ ID NO: 21 - protein, 229 aa, Rattus norvegicus [sequence omitted]

SEQ ID NO: 22 - protein, 229 aa, Mesocricetus auratus
  REGION 1..229: note = MISC_FEATURE - maAPOBEC-1 polypeptide sequence
MSSETGPVVVDPTLRRRIEPHEFDAFFDQGELRKETCLLYEIRWGGRHNIWRHTGQNTSRHVEINFIEKFTSERYFYPSTRCSIVWFLSWSPCGECSKAITEFLSGHPNVTLFIYAARLYHHTDQRNRQGLRDLISRGVTIRIMTEQEYCYCWRNFVNYPPSNEVYWPRYPNLWMRLYALELYCIHLGLPPCLKIKRRHQYPLTFFRLNLQSCHYQRIPPHILWATGFI

SEQ ID NO: 23 - protein, 236 aa, Pongo pygmaeus
  REGION 1..236: note = MISC_FEATURE - ppAPOBEC-1 polypeptide sequence
MTSEKGPSTGDPTLRRRIESWEFDVFYDPRELRKETCLLYEIKWGMSRKIWRSSGKNTTNHVEVNFIKKFTSERRFHSSISCSITWFLSWSPCWECSQAIREFLSQHPGVTLVIYVARLFWHMDQRNRQGLRDLVNSGVTIQIMRASEYYHCWRNFVNYPPGDEAHWPQYPPLWMMLYALELHCIILSLPPCLKISRRWQNHLAFFRLHLQNCHYQTIPPHILLATGLIHPSVTWR

SEQ ID NO: 24 - protein, 236 aa, Oryctolagus cuniculus
  REGION 1..236: note = MISC_FEATURE - ocAPOBEC1 polypeptide sequence
MASEKGPSNKDYTLRRRIEPWEFEVFFDPQELRKEACLLYEIKWGASSKTWRSSGKNTTNHVEVNFLEKLTSEGRLGPSTCCSITWFLSWSPCWECSMAIREFLSQHPGVTLIIFVARLFQHMDRRNRQGLKDLVTSGVTVRVMSVSEYCYCWENFVNYPPGKAAQWPRYPPRWMLMYALELYCIILGLPPCLKISRRHQKQLTFFSLTPQYCHYKMIPPYILLATGLLQPSVPWR

SEQ ID NO: 25 - protein, 235 aa, Monodelphis domestica
  REGION 1..235: note = MISC_FEATURE - mdAPOBEC-1 polypeptide sequence
MNSKTGPSVGDATLRRRIKPWEFVAFFNPQELRKETCLLYEIKWGNQNIWRHSNQNTSQHAEINFMEKFTAERHFNSSVRCSITWFLSWSPCWECSKAIRKFLDHYPNVTLAIFISRLYWHMDQQHRQGLKELVHSGVTIQIMSYSEYHYCWRNFVDYPQGEEDYWPKYPYLWIMLYVLELHCIILGLPPCLKISGSHSNQLALFSLDLQDCHYQKIPYNVLVATGLVQPFVTWR

SEQ ID NO: 26 - protein, 224 aa, Pongo pygmaeus
  REGION 1..224: note = MISC_FEATURE - ppAPOBEC-2 polypeptide sequence
MAQKEEAAAATEAASQNGEDLENLDDPEKLKELIELPPFEIVTGERLPANFFKFQFRNVEYSSGRNKTFLCYVVEAQGKGGQVQASRGYLEDEHAAAHAEEAFFNTILPAFDPALRYNVTWYVSSSPCAACADRIIKTLSKTKNLRLLILVGRLFMWEELEIQDALKKLKEAGCKLRIMKPQDFEYVWQNFVEQEEGESKAFQPWEDIQENFLYYEEKLADILK

SEQ ID NO: 27 - protein, 224 aa, Bos taurus
  REGION 1..224: note = MISC_FEATURE - btAPOBEC-2 polypeptide sequence
MAQKEEAAAAAEPASQNGEEVENLEDPEKLKELIELPPFEIVTGERLPAHYFKFQFRNVEYSSGRNKTFLCYVVEAQSKGGQVQASRGYLEDEHATNHAEEAFFNSIMPTFDPALRYMVTWYVSSSPCAACADRIVKTLNKTKNLRLLILVGRLFMWEEPEIQAALRKLKEAGCRLRIMKPQDFEYIWQNFVEQEEGESKAFEPWEDIQENFLYYEEKLADILK

SEQ ID NO: 28 - protein, 440 aa, Mus musculus
  REGION 1..440: note = MISC_FEATURE - mAPOBEC-3-(1) polypeptide sequence
MQPQRLGPRAGMGPFCLGCSHRKCYSPIRNLISQETFKFHFKNLGYAKGRKDTFLCYEVTRKDCDSPVSLHHGVFKNKDNIHAEICFLYWFHDKVLKVLSPREEFKITWYMSWSPCFECAEQIVRFLATHHNLSLDIFSSRLYNVQDPETQQNLCRLVQEGAQVAAMDLYEFKKCWKKFVDNGGRRFRPWKRLLTNFRYQDSKLQEILRPCYISVPSSSSSTLSNICLTKGLPETRFWVEGRRMDPLSEEEFYSQFYNQRVKHLCYYHRMKPYLCYQLEQFNGQAPLKGCLLSEKGKQHAEILFLDKIRSMELSQVTITCYLTWSPCPNCAWQLAAFKRDRPDLILHIYTSRLYFHWKRPFQKGLCSLWQSGILVDVMDLPQFTDCWTNFVNPKRPFWPWKGLEIISRRTQRRLRRIKESWGLQDLVNDFGNLQLGPPMS

SEQ ID NO: 29 - protein, 429 aa, Mus musculus
  REGION 1..429: note = MISC_FEATURE - APOBEC-3-(2) (Mouse APOBEC-3) polypeptide sequence
  REGION 71..108: note = MISC_FEATURE - Nucleic acid editing domain
  REGION 288..319: note = MISC_FEATURE - Nucleic acid editing domain
MGPFCLGCSHRKCYSPIRNLISQETFKFHFKNLGYAKGRKDTFLCYEVTRKDCDSPVSLHHGVFKNKDNIHAEICFLYWFHDKVLKVLSPREEFKITWYMSWSPCFECAEQIVRFLATHHNLSLDIFSSRLYNVQDPETQQNLCRLVQEGAQVAAMDLYEFKKCWKKFVDNGGRRFRPWKRLLTNFRYQDSKLQEILRPCYIPVPSSSSSTLSNICLTKGLPETRFCVEGRRMDPLSEEEFYSQFYNQRVKHLCYYHRMKPYLCYQLEQFNGQAPLKGCLLSEKGKQHAEILFLDKIRSMELSQVTITCYLTWSPCPNCAWQLAAFKRDRPDLILHIYTSRLYFHWKRPFQKGLCSLWQSGILVDVMDLPQFTDCWTNFVNPKRPFWPWKGLEIISRRTQRRLRRIKESWGLQDLVNDFGNLQLGPPMS

SEQ ID NO: 30 - protein, 430 aa, Rattus sp.
  REGION 1..430: note = MISC_FEATURE - APOBEC-3 polypeptide sequence
  REGION 72..109: note = MISC_FEATURE - Nucleic acid editing domain
  REGION 289..320: note = MISC_FEATURE - Nucleic acid editing domain
MGPFCLGCSHRKCYSPIRNLISQETFKFHFKNRLRYAIDRKDTFLCYEVTRKDCDSPVSLHHGVFKNKDNIHAEICFLYWFHDKVLKVLSPREEFKITWYMSWSPCFECAEQVLRFLATHHNLSLDIFSSRLYNIRDPENQQNLCRLVQEGAQVAAMDLYEFKKCWKKFVDNGGRRFRPWKKLLTNFRYQDSKLQEILRPCYIPVPSSSSSTLSNICLTKGLPETRFCVERRRVHLLSEEEFYSQFYNQRVKHLCYYHGVKPYLCYQLEQFNGQAPLKGCLLSEKGKQHAEILFLDKIRSMELSQVIITCYLTWSPCPNCAWQLAAFKRDRPDLILHIYTSRLYFHWKRPFQKGLCSLWQSGILVDVMDLPQFTDCWTNFVNPKRPFWPWKGLEIISRRTQRRLHRIKESWGLQDLVNDFGNLQLGPPMS

SEQ ID NO: 31 - protein, 199 aa, Homo sapiens
  REGION 1..199: note = MISC_FEATURE - hAPOBEC-3A polypeptide sequence
  REGION 70..106: note = MISC_FEATURE - Nucleic acid editing domain
MEASPASGPRHLMDPHIFTSNFNNGIGRHKTYLCYEVERLDNGTSVKMDQHRGFLHNQAKNLLCGFYGRHAELRFLDLVPSLQLDPAQIYRVTWFISWSPCFSWGCAGEVRAFLQENTHVRLRIFAARIYDYDPLYKEALQMLRDAGAQVSIMTYDEFKHCWDTFVDHQGCPFQPWDGLDEHSQALSGRLRAILQNQGN

SEQ ID NO: 32 - protein, 373 aa, Homo sapiens
  REGION 1..373: note = MISC_FEATURE - hAPOBEC-3F polypeptide sequence
  REGION 65..99: note = MISC_FEATURE - Nucleic acid editing domain
  REGION 248..283: note = MISC_FEATURE - Nucleic acid editing domain
MKPHFRNTVERMYRDTFSYNFYNRPILSRRNTVWLCYEVKTKGPSRPRLDAKIFRGQVYSQPEHHAEMCFLSWFCGNQLPAYKCFQITWFVSWTPCPDCVAKLAEFLAEHPNVTLTISAARLYYYWERDYRRALCRLSQAGARVKIMDDEEFAYCWENFVYSEGQPFMPWYKFDDNYAFLHRTLKEILRNPMEAMYPHIFYFHFKNLRKAYGRNESWLCFTMEVVKHHSPVSWKRGVFRNQVDPETHCHAERCFLSWFCDDILSPNTNYEVTWYTSWSPCPECAGEVAEFLARHSNVNLTIFTARLYYFWDTDYQEGLRSLSQEGASVEIMGYKDFKYCWENFVYNDDEPFKPWKGLKYNFLFLDSKLQEILE

SEQ ID NO: 33 - protein, 370 aa, Rhesus macaque
  REGION 1..370: note = MISC_FEATURE - Rhesus macaque APOBEC-3G polypeptide sequence
  REGION 1..61: note = MISC_FEATURE - Cytoplasmic localization signal
MVEPMDPRTFVSNFNNRPILSGLNTVWLCCEVKTKDPSGPPLDAKIFQGKVYSKAKYHPEMRFLRWFHKWRQLHHDQEYKVTWYVSWSPCTRCANSVATFLAKDPKVTLTIFVARLYYFWKPDYQQALRILCQKRGGPHATMKIMNYNEFQDCWNKFVDGRGKPFKPRNNLPKHYTLLQATLGELLRHLMDPGTFTSNFNNKPWVSGQHETYLCYKVERLHNDTWVPLNQHRGFLRNQAPNIHGFPKGRHAELCFLDLIPFWKLDGQQYRVTCFTSWSPCFSCAQEMAKFISNNEHVSLCIFAARIYDDQGRYQEGLRALHRDGAKIAMMNYSEFEYCWDTFVDRQGRPFQPWDGLDEHSQALSGRLRAI

SEQ ID NO: 34 - protein, 384 aa, Pan troglodytes
  REGION 1..384: note = MISC_FEATURE - Chimpanzee APOBEC-3G polypeptide sequence
  REGION 1..60: note = MISC_FEATURE - Cytoplasmic localization signal
  REGION 65..100: note = MISC_FEATURE - Nucleic acid editing domain
  REGION 257..291: note = MISC_FEATURE - Nucleic acid editing domain
MKPHFRNPVERMYQDTFSDNFYNRPILSHRNTVWLCYEVKTKGPSRPPLDAKIFRGQVYSKLKYHPEMRFFHWFSKWRKLHRDQEYEVTWYISWSPCTKCTRDVATFLAEDPKVTLTIFVARLYYFWDPDYQEALRSLCQKRDGPRATMKIMNYDEFQHCWSKFVYSQRELFEPWNNLPKYYILLHIMLGEILRHSMDPPTFTSNFNNELWVRGRHETYLCYEVERLHNDTWVLLNQRRGFLCNQAPHKHGFLEGRHAELCFLDVIPFWKLDLHQDYRVTCFTSWSPCFSCAQEMAKFISNNKHVSLCIFAARIYDDQGRCQEGLRTLAKAGAKISIMTYSEFKHCWDTFVDHQGCPFQPWDGLEEHSQALSGRLRAILQNQGN

SEQ ID NO: 35 - protein, 377 aa, Chlorocebus sabaeus
  REGION 1..377: note = MISC_FEATURE - Green monkey APOBEC-3G polypeptide sequence
  REGION 1..60: note = MISC_FEATURE - Cytoplasmic localization signal
  REGION 65..100: note = MISC_FEATURE - Nucleic acid editing domain
  REGION 257..290: note = MISC_FEATURE - Nucleic acid editing domain
MNPQIRNMVEQMEPDIFVYYFNNRPILSGRNTVWLCYEVKTKDPSGPPLDANIFQGKLYPEAKDHPEMKFLHWFRKWRQLHRDQEYEVTWYVSWSPCTRCANSVATFLAEDPKVTLTIFVARLYYFWKPDYQQALRILCQERGGPHATMKIMNYNEFQHCWNEFVDGQGKPFKPRKNLPKHYTLLHATLGELLRHVMDPGTFTSNFNNKPWVSGQRETYLCYKVERSHNDTWVLLNQHRGFLRNQAPDRHGFPKGRHAELCFLDLIPFWKLDDQQYRVTCFTSWSPCFSCAQKMAKFISNNKHVSLCIFAARIYDDQGRCQEGLRTLHRDGAKIAVMNYSEFEYCWDTFVDRQGRPFQPWDGLDEHSQALSGRLRAI

SEQ ID NO: 36 - protein, 384 aa, Homo sapiens
  REGION 1..384: note = MISC_FEATURE - Human APOBEC-3G polypeptide sequence
  REGION 1..60: note = MISC_FEATURE - Cytoplasmic localization signal
  REGION 65..100: note = MISC_FEATURE - Nucleic acid editing domain
  REGION 257..291: note = MISC_FEATURE - Nucleic acid editing domain
MKPHFRNTVERMYRDTFSYNFYNRPILSRRNTVWLCYEVKTKGPSRPPLDAKIFRGQVYSELKYHPEMRFFHWFSKWRKLHRDQEYEVTWYISWSPCTKCTRDMATFLAEDPKVTLTIFVARLYYFWDPDYQEALRSLCQKRDGPRATMKIMNYDEFQHCWSKFVYSQRELFEPWNNLPKYYILLHIMLGEILRHSMDPPTFTFNFNNEPWVRGRHETYLCYEVERMHNDTWVLLNQRRGFLCNQAPHKHGFLEGRHAELCFLDVIPFWKLDLDQDYRVTCFTSWSPCFSCAQEMAKFISKNKHVSLCIFTARIYDDQGRCQEGLRTLAEAGAKISIMTYSEFKHCWDTFVDHQGCPFQPWDGLDEHSQDLSGRLRAILQNQEN

SEQ ID NO: 37 - protein, 382 aa, Homo sapiens
  REGION 1..382: note = MISC_FEATURE - Human APOBEC-3B polypeptide sequence
  REGION 66..100: note = MISC_FEATURE - Nucleic acid editing domain
  REGION 251..289: note = MISC_FEATURE - Nucleic acid editing domain
MNPQIRNPMERMYRDTFYDNFENEPILYGRSYTWLCYEVKIKRGRSNLLWDTGVFRGQVYFKPQYHAEMCFLSWFCGNQLPAYKCFQITWFVSWTPCPDCVAKLAEFLSEHPNVTLTISAARLYYYWERDYRRALCRLSQAGARVTIMDYEEFAYCWENFVYNEGQQFMPWYKFDENYAFLHRTLKEILRYLMDPDTFTFNFNNDPLVLRRRQTYLCYEVERLDNGTWVLMDQHMGFLCNEAKNLLCGFYGRHAELRFLDLVPSLQLDPAQIYRVTWFISWSPCFSWGCAGEVRAFLQENTHVRLRIFAARIYDYDPLYKEALQMLRDAGAQVSIMTYDEFEYCWDTFVYRQGCPFQPWDGLEEHSQALSGRLRAILQNQGN

SEQ ID NO: 38 - protein, 395 aa, Rattus sp.
  REGION 1..395: note = MISC_FEATURE - Rat APOBEC-3B polypeptide sequence
MQPQGLGPNAGMGPVCLGCSHRRPYSPIRNPLKKLYQQTFYFHFKNVRYAWGRKNNFLCYEVNGMDCALPVPLRQGVFRKQGHIHAELCFIYWFHDKVLRVLSPMEEFKVTWYMSWSPCSKCAEQVARFLAAHRNLSLAIFSSRLYYYLRNPNYQQKLCRLIQEGVHVAAMDLPEFKKCWNKFVDNDGQPFRPWMRLRINFSFYDCKLQEIFSRMNLLREDVFYLQFNNSHRVKPVQNRYYRRKSYLCYQLERANGQEPLKGYLLYKKGEQHVEILFLEKMRSMELSQVRITCYLTWSPCPNCARQLAAFKKDHPDLILRIYTSRLYFWRKKFQKGLCTLWRSGIHVDVMDLPQFADCWTNFVNPQRPFRPWNELEKNSWRIQRRLRRIKESWGL

SEQ ID NO: 39 - protein, 226 aa, Bos taurus
  REGION 1..226: note = MISC_FEATURE - Bovine APOBEC-3B polypeptide sequence
DGWEVAFRSGTVLKAGVLGVSMTEGWAGSGHPGQGACVWTPGTRNTMNLLREVLFKQQFGNQPRVPAPYYRRKTYLCYQLKQRNDLTLDRGCFRNKKQRHAERFIDKINSLDLNPSQSYKIICYITWSPCPNCANELVNFITRNNHLKLEIFASRLYFHWIKSFKMGLQDLQNAGISVAVMTHTEFEDCWEQFVDNQSRPFQPWDKLEQYSASIRRRLQRILTAPI

SEQ ID NO: 40 - protein, 490 aa, Pan troglodytes
  REGION 1..490: note = MISC_FEATURE - Chimpanzee APOBEC-3B polypeptide sequence
MNPQIRNPMEWMYQRTFYYNFENEPILYGRSYTWLCYEVKIRRGHSNLLWDTGVFRGQMYSQPEHHAEMCFLSWFCGNQLSAYKCFQITWFVSWTPCPDCVAKLAKFLAEHPNVTLTISAARLYYYWERDYRRALCRLSQAGARVKIMDDEEFAYCWENFVYNEGQPFMPWYKFDDNYAFLHRTLKEIIRHLMDPDTFTFNFNNDPLVLRRHQTYLCYEVERLDNGTWVLMDQHMGFLCNEAKNLLCGFYGRHAELRFLDLVPSLQLDPAQIYRVTWFISWSPCFSWGCAGQVRAFLQENTHVRLRIFAARIYDYDPLYKEALQMLRDAGAQVSIMTYDEFEYCWDTFVYRQGCPFQPWDGLEEHSQALSGRLRAILQVRASSLCMVPHRPPPPPQSPGPCLPLCSEPPLGSLLPTGRPAPSLPFLLTASFSFPPPASLPPLPSLSLSPGHLPVPSFHSLTSCSIQPPCSSRIRETEGWASVSKEGRDLG

SEQ ID NO: 41 - protein, 190 aa, Homo sapiens
  REGION 1..190: note = MISC_FEATURE - Human APOBEC-3C polypeptide sequence
  REGION 65..100: note = MISC_FEATURE - Nucleic acid editing domain
MNPQIRNPMKAMYPGTFYFQFKNLWEANDRNETWLCFTVEGIKRRSVVSWKTGVFRNQVDSETHCHAERCFLSWFCDDILSPNTKYQVTWYTSWSPCPDCAGEVAEFLARHSNVNLTIFTARLYYFQYPCYQEGLRSLSQEGVAVEIMDYEDFKYCWENFVYNDNEPFKPWKGLKTNFRLLKRRLRESLQ

SEQ ID NO: 42 - protein, 190 aa, Gorilla sp.
  REGION 1..190: note = MISC_FEATURE - Gorilla APOBEC-3C polypeptide sequence
  REGION 65..100: note = MISC_FEATURE - Nucleic acid editing domain
MNPQIRNPMKAMYPGTFYFQFKNLWEANDRNETWLCFTVEGIKRRSVVSWKTGVFRNQVDSETHCHAERCFLSWECDDILSPNTNYQVTWYTSWSPCPECAGEVAEFLARHSNVNLTIFTARLYYFQDTDYQEGLRSLSQEGVAVKIMDYKDFKYCWENFVYNDDEPFKPWKGLKYNFRFLKRRLQEILE

SEQ ID NO: 43 - protein, 202 aa, Rhesus macaque
  REGION 1..202: note = MISC_FEATURE - Rhesus macaque APOBEC-3A polypeptide sequence
  REGION 72..103: note = MISC_FEATURE - Nucleic acid editing domain
MDGSPASRPRHLMDPNTFTFNFNNDLSVRGRHQTYLCYEVERLDNGTWVPMDERRGFLCNKAKNVPCGDYGCHVELRFLCEVPSWQLDPAQTYRVTWFISWSPCFRRGCAGQVRVFLQENKHVRLRIFAARIYDYDPLYQEALRTLRDAGAQVSIMTYEEFKHCWDTFVDRQGRPFQPWDGLDEHSQALSGRLRAILQNQGN

SEQ ID NO: 44 - protein, 185 aa, Bos taurus
  REGION 1..185: note = MISC_FEATURE - Bovine APOBEC-3A polypeptide sequence
  REGION 56..86: note = MISC_FEATURE - Nucleic acid editing domain
MDEYTFTENFNNQGWPSKTYLCYEMERLDGDATIPLDEYKGFVRNKGLDQPEKPCHAELYFLGKIHSWNLDRNQHYRLTCFISWSPCYDCAQKLTTFLKENHHISLHILASRIYTHNRFGCHQSGLCELQAAGARITIMTFEDFKHCWETFVDHKGKPFQPWEGLNVKSQALCTELQAILKTQQN

SEQ ID NO: 45 - protein, 200 aa, Homo sapiens
  REGION 1..200: note = MISC_FEATURE - Human APOBEC-3H polypeptide sequence
  REGION 54..88: note = MISC_FEATURE - Nucleic acid editing domain
MALLTAETFRLQFNNKRRLRRPYYPRKALLCYQLTPQNGSTPTRGYFENKKKCHAEICFINEIKSMGLDETQCYQVTCYLTWSPCSSCAWELVDFIKAHDHLNLGIFASRLYYHWCKPQQKGLRLLCGSQVPVEVMGFPKFADCWENFVDHEKPLSFNPYKMLEELDKNSRAIKRRLERIKIPGVRAQGRYMDILCDAEV

SEQ ID NO: 46 - protein, 210 aa, Rhesus macaque
  REGION 1..210: note = MISC_FEATURE - Rhesus macaque APOBEC-3H polypeptide sequence
MALLTAKTFSLQFNNKRRVNKPYYPRKALLCYQLTPQNGSTPTRGHLKNKKKDHAEIRFINKIKSMGLDETQCYQVTCYLTWSPCPSCAGELVDFIKAHRHLNLRIFASRLYYHWRPNYQEGLLLLCGSQVPVEVMGLPEFTDCWENFVDHKEPPSFNPSEKLEELDKNSQAIKRRLERIKSRSVDVLENGLRSLQLGPVTPSSSIRNSR

SEQ ID NO: 47 - protein, 386 aa, Homo sapiens
  REGION 1..386: note = MISC_FEATURE - Human APOBEC-3D polypeptide sequence
  REGION 78..109: note = MISC_FEATURE - Nucleic acid editing domain
  REGION 262..296: note = MISC_FEATURE - Nucleic acid editing domain
MNPQIRNPMERMYRDTFYDNFENEPILYGRSYTWLCYEVKIKRGRSNLLWDTGVFRGPVLPKRQSNHRQEVYFRFENHAEMCFLSWFCGNRLPANRRFQITWFVSWNPCLPCVVKVTKFLAEHPNVTLTISAARLYYYRDRDWRWVLLRLHKAGARVKIMDYEDFAYCWENFVCNEGQPFMPWYKFDDNYASLHRTLKEILRNPMEAMYPHIFYFHFKNLLKACGRNESWLCFTMEVTKHHSAVFRKRGVFRNQVDPETHCHAERCFLSWFCDDILSPNTNYEVTWYTSWSPCPECAGEVAEFLARHSNVNLTIFTARLCYFWDTDYQEGLCSLSQEGASVKIMGYKDFVSCWKNFVYSDDEPFKPWKGLQTNFRLLKRRLREILQ

SEQ ID NO: 48 - protein, 236 aa, Homo sapiens
  REGION 1..236: note = MISC_FEATURE - Human APOBEC-1 polypeptide sequence
MTSEKGPSTGDPTLRRRIEPWEFDVFYDPRELRKEACLLYEIKWGMSRKIWRSSGKNTTNHVEVNFIKKFTSERDFHPSMSCSITWFLSWSPCWECSQAIREFLSRHPGVTLVIYVARLFWHMDQQNRQGLRDLVNSGVTIQIMRASEYYHCWRNFVNYPPGDEAHWPQYPPLWMMLYALELHCIILSLPPCLKISRRWQNHLTFFRLHLQNCHYQTIPPHILLATGLIHPSVAWR

SEQ ID NO: 49 - protein, 229 aa, Mus musculus
  REGION 1..229: note = MISC_FEATURE - Mouse APOBEC-1 polypeptide sequence
MSSETGPVAVDPTLRRRIEPHEFEVFFDPRELRKETCLLYEINWGGRHSVWRHTSQNTSNHVEVNFLEKFTTERYFRPNTRCSITWFLSWSPCGECSRAITEFLSRHPYVTLFIYIARLYHHTDQRNRQGLRDLISSGVTIQIMTEQEYCYCWRNFVNYPPSNEAYWPRYPHLWVKLYVLELYCIILGLPPCLKILRRKQPQLTFFTITLQTCHYQRIPPHLLWATGLK

SEQ ID NO: 50 - protein, 224 aa, Homo sapiens
  REGION 1..224: note = MISC_FEATURE - Human APOBEC-2 polypeptide sequence
MAQKEEAAVATEAASQNGEDLENLDDPEKLKELIELPPFEIVTGERLPANFFKFQFRNVEYSSGRNKTFLCYVVEAQGKGGQVQASRGYLEDEHAAAHAEEAFFNTILPAFDPALRYNVTWYVSSSPCAACADRIIKTLSKTKNLRLLILVGRLFMWEEPEIQAALKKLKEAGCKLRIMKPQDFEYVWQNFVEQEEGESKAFQPWEDIQENFLYYEEKLADILK

SEQ ID NO: 51 - protein, 224 aa, Mus musculus
  REGION 1..224: note = MISC_FEATURE - Mouse APOBEC-2 polypeptide sequence
MAQKEEAAEAAAPASQNGDDLENLEDPEKLKELIDLPPFEIVTGVRLPVNFFKFQFRNVEYSSGRNKTFLCYVVEVQSKGGQAQATQGYLEDEHAGAHAEEAFFNTILPAFDPALKYNVTWYVSSSPCAACADRILKTLSKTKNLRLLILVSRLFMWEEPEVQAALKKLKEAGCKLRIMKPQDFEYIWQNFVEQEEGESKAFEPWEDIQENFLYYEEKLADILK

SEQ ID NO: 52 - protein, 224 aa, Rattus sp.
  REGION 1..224: note = MISC_FEATURE - Rat APOBEC-2 polypeptide sequence
MAQKEEAAEAAAPASQNGDDLENLEDPEKLKELIDLPPFEIVTGVRLPVNFFKFQFRNVEYSSGRNKTFLCYVVEAQSKGGQVQATQGYLEDEHAGAHAEEAFFNTILPAFDPALKYNVTWYVSSSPCAACADRILKTLSKTKNLRLLILVSRLFMWEEPEVQAALKKLKEAGCKLRIMKPQDFEYLWQNFVEQEEGESKAFEPWEDIQENFLYYEEKLADILK

SEQ ID NO: 53 - protein, 208 aa, Petromyzon marinus
  REGION 1..208: note = MISC_FEATURE - Petromyzon marinus CDA1 (pmCDAl) polypeptide sequence
MTDAEYVRIHEKLDIYTFKKQFFNNKKSVSHRCYVLFELKRRGERRACFWGYAVNKPQSGTERGIHAEIFSIRKVEEYLRDNPGQFTINWYSSWSPCADCAEKILEWYNQELRGNGHTLKIWACKLYYEKNARNQIGLWNLRDNGVGLNVMVSEHYQCCRKIFIQSSHNQLNENRWLEKTLKRAEKRRSELSFMIQVKILHTTKSPAV

SEQ ID NO: 54 - protein, 381 aa, Homo sapiens
  REGION 1..381: note = MISC_FEATURE - Human APOBEC3G D316R D317R polypeptide sequence
MKPHFRNTVERMYRDTFSYNFYNRPILSRRNTVWLCYEVKTKGPSRPPLDAKIFRGQVYSELKYHPEMRFFHWFSKWRKLHRDQEYEVTWYISWSPCTKCTRDMATFLAEDPKVTLTIFVARLYYFWDPDYQEALRSLCQKRDGPRATMKFNYDEFQHCWSKFVYSQRELFEPWNNLPKYYILLHFMLGEILRHSMDPPTFTFNFNNEPWVRGRHETYLCYEVERMHNDTWVLLNQRRGFLCNQAPHKHGFLEGRHAELCFLDVIPFWKLDLDQDYRVTCFTSWSPCFSCAQEMAKFISKKHVSLCIFTARIYRRQGRCQEGLRTLAEAGAKISFTYSEFKHCWDTFVDHQGCPFQPWDGLDEHSQDLSGRLRAILQNQEN

SEQ ID NO: 55 - protein, 182 aa, Homo sapiens
  REGION 1..182: note = MISC_FEATURE - Human APOBEC3G chain A polypeptide sequence
MDPPTFTFNFNNEPWWGRHETYLCYEVERMHNDTWVLLNQRRGFLCNQAPHKHGFLEGRHAELCFLDVIPFWKLDLDQDYRVTCFTSWSPCFSCAQEMAKFISKNKHVSLCIFTARIYDDQGRCQEGLRTLAEAGAKISFTYSEFKHCWDTFVDHQGCPFQPWDGLDEHSQDLSGRLRAILQ

SEQ ID NO: 56 - protein, 184 aa, Homo sapiens
  REGION 1..184: note = MISC_FEATURE - Human APOBEC3G chain A D120R D121R polypeptide sequence
MDPPTFTFNFNNEPWVRGRHETYLCYEVERMHNDTWVLLNQRRGFLCNQAPHKHGFLEGRHAELCFLDVIPFWKLDLDQDYRVTCFTSWSPCFSCAQEMAKFISKNKHVSLCIFTARIYRRQGRCQEGLRTLAEAGAKISFMTYSEFKHCWDTFVDHQGCPFQPWDGLDEHSQDLSGRLRAILQ

SEQ ID NO: 57 - protein, 367 aa, Homo sapiens
  REGION 1..367: note = MISC_FEATURE - hAPOBEC-4 polypeptide sequence
MEPIYEEYLANHGTIVKPYYWLSFSLDCSNCPYHIRTGEEARVSLTEFCQIFGFPYGTTFPQTKHLTFYELKTSSGSLVQKGHASSCTGNYIHPESMLFEMNGYLDSAIYNNDSIRHIILYSNNSPCNEANHCCISKMYNFLITYPGITLSIYFSQLYHTEMDFPASAWNREALRSLASLWPRVVLSPISGGIWHSVLHSFISGVSGSHVFQPILTGRALADRHNAYEINAITGVKPYFTDVLLQTKRNPNTKAQEALESYPLNNAFPGQFFQMPSGQLQPNLPPDLRAPVVFVLVPLRDLPPMHMGQNPNKPRNIVRHLNMPQMSFQETKDLGRLPTGRSVEIVEITEQFASSKEADEKKKKKGKK

SEQ ID NO: 58 - protein, 388 aa, Rattus norvegicus
  REGION 1..388: note = MISC_FEATURE - rAPOBEC-4 polypeptide sequence
MEPLYEEYLTHSGTIVKPYYWLSVSLNCTNCPYHIRTGEEARVPYTEFHQTFGFPWSTYPQTKHLTFYELRSSSGNLIQKGLASNCTGSHTHPESMLFERDGYLDSLIFHDSNIRHIILYSNNSPCDEANHCCISKMYNFLMNYPEVTLSVFFSQLYHTENQFPTSAWNREALRGLASLWPQVTLSAISGGIWQSILETFVSGISEGLTAVRPFTAGRTLTDRYNAYEINCITEVKPYFTDALHSWQKENQDQKVWAASENQPLHNTTPAQWQPDMSQDCRTPAVFMLVPYRDLPPIHVNPSPQKPRTVVRHLNTLQLSASKVKALRKSPSGRPVKKEEARKGSTRSQEANETNKSKWKKQTLFIKSNICHLLEREQKKIGILSSWSV

SEQ ID NO: 59 - protein, 363 aa, Macaca fascicularis
  REGION 1..363: note = MISC_FEATURE - mfAPOBEC-4 polypeptide sequence
MEPTYEEYLANHGTIVKPYYWLSFSLDCSNCPYHIRTGEEARVSLTEFCQIFGFPYGTTYPQTKHLTFYELKTSSGSLVQKGHASSCTGNYIHPESMLFEMNGYLDSAIYNNDSIRHIILYCNNSPCNEANHCCISKVYNFLITYPGITLSIYFSQLYHTEMDFPASAWNREALRSLASLWPRVVLSPISGGIWHSVLHSFVSGVSGSHVFQPILTGRALTDRYNAYEINAITGVKPFFTDVLLHTKRNPNTKAQMALESYPLNNAFPGQSFQMTSGIPPDLRAPVVFVLLPLRDLPPMHMGQDPNKPRNIIRHLNMPQMSFQETKDLERLPTRRSVETVEITERFASSKQAEEKTKKKKGKK

SEQ ID NO: 60 - protein, 218 aa, Rattus norvegicus
  REGION 1..218: note = MISC_FEATURE - rAPOBEC-1 (delta 177-186) polypeptide sequence
MSSETGPVAVDPTLRRRIEPHEFEVFFDPRELRKETCLLYEINWGGRHSIWRHTSQNTNKHVEVNFIEKFTTERYFCPNTRCSITWFLSWSPCGECSRAITEFLSRYPHVTLFIYIARLYHHADPRNRQGLRDLISSGVTIQIMTEQESGYCWRNFVNYSPSNEAHWPRYPHLWVRGLPPCLNILRRKQPQLTFFTIALQSCHYQRLPPHILWATGLK

SEQ ID NO: 61 - protein, 218 aa, Rattus norvegicus
  REGION 1..218: note = MISC_FEATURE - rAPOBEC-1 (delta 202-213) polypeptide sequence
MSSETGPVAVDPTLRRRIEPHEFEVFFDPRELRKETCLLYEINWGGRHSIWRHTSQNTNKHVEVNFIEKFTTERYFCPNTRCSITWFLSWSPCGECSRAITEFLSRYPHVTLFIYIARLYHHADPRNRQGLRDLISSGVTIQIMTEQESGYCWRNFVNYSPSNEAHWPRYPHLWVRLYVLELYCIILGLPPCLNILRRKQPQHYQRLPPHILWATGLK

SEQ ID NO: 62 - protein, 198 aa, Mus musculus
  REGION 1..198: note = MISC_FEATURE - mouse cytidine deaminase polypeptide sequence
  REGION 1..30: note = MISC_FEATURE - Nuclear localization sequence
  REGION 183..198: note = MISC_FEATURE - Nuclear export signal
MDSLLMKQKKFLYHFKNVRWAKGRHETYLCYVVKRRDSATSCSLDFGHLRNKSGCHVELLFLRYISDWDLDPGRCYRVTWFTSWSPCYDCARHVAEFLRWNPNLSLRIFTARLYFCEDRKAEPEGLRRLHRAGVQIGIMTFKDYFYCWNTFVENRERTFKAWEGLHENSVRLTRQLRRILLPLYEVDDLRDAFRMLGF

SEQ ID NO: 63 - protein, 224 aa, Petromyzon marinus
  REGION 1..224: note = MISC_FEATURE - pmCDA-1 polypeptide sequence
MAGYECVRVSEKLDFDTFEFQFENLHYATERHRTYVIFDVKPQSAGGRSRRLWGYIINNPNVCHAELILMSMIDRHLESNPGVYAMTWYMSWSPCANCSSKLNPWLKNLLEEQGHTLTMHFSRIYDRDREGDHRGLRGLKHVSNSFRMGVVGRAEVKECLAEYVEASRRTLTWLDTTESMAAKMRRKLFCILVRCAGMRESGIPLHLFTLQTPLLSGRVVWWRV

SEQ ID NO: 64 - protein, 331 aa, Petromyzon marinus
  REGION 1..331: note = MISC_FEATURE - pmCDA-2 polypeptide sequence
MELREVVDCALASCVRHEPLSRVAFLRCFAAPSQKPRGTVILFYVEGAGRGVTGGHAVNYNKQGTSIHAEVLLLSAVRAALLRRRRCEDGEEATRGCTLHCYSTYSPCRDCVEYIQEFGASTGVRVVIHCCRLYELDVNRRRSEAEGVLRSLSRLGRDFRLMGPRDAIALLLGGRLANTADGESGASGNAWVTETNVVEPLVDMTGFGDEDLHAQVQRNKQIREAYANYASAVSLMLGELHVDPDKFPFLAEFLAQTSVEPSGTPRETRGRPRGASSRGPEIGRQRPADFERALGAYGLFLHPRIVSREADREEIKRDLIVVMRKHNYQGP

SEQ ID NO: 65 - protein, 209 aa, Petromyzon marinus
  REGION 1..209: note = MISC_FEATURE - pmCDA-5 polypeptide sequence
MAGDENVRVSEKLDFDTFEFQFENLHYATERHRTYVIFDVKPQSAGGRSRRLWGYIINNPNVCHAELILMSMIDRHLESNPGVYAMTWYMSWSPCANCSSKLNPWLKNLLEEQGHTLMMHFSRIYDRDREGDHRGLRGLKHVSNSFRMGVVGRAEVKECLAEYVEASRRTLTWLDTTESMAAKMRRKLFCILVRCAGMRESGMPLHLFT

SEQ ID NO: 66 - protein, 158 aa, Saccharomyces cerevisiae
  REGION 1..158: note = MISC_FEATURE - yCD polypeptide sequence
MVTGGMASKWDQKGMDIAYEEAALGYKEGGVPIGGCLINNKDGSVLGRGHNMRFQKGSATLHGEISTLENCGRLEGKVYKDTTLYTTLSPCDMCTGAIIMYGIPRCVVGENVNFKSKGEKYLQTRGHEVVVVDDERCKKIMKQFIDERPQDWFEDIGE

SEQ ID NO: 67 - protein, 194 aa, synthetic construct
  REGION 1..194: note = cytidine deaminase polypeptide sequence
MKPQIRDHRPNPMEAMYPHIFYFHFENLEKAYGRNETWLCFTVEIIKQYLPVPWKKGVFRNQVDPETHCHAEKCFLSWFCNNTLSPKKNYQVTWYTSWSPCPECAGEVAEFLAEHSNVKLTIYTARLYYFWDTDYQEGLRSLSEEGASVEIMDYEDFQYCWENFVYDDGEPFKRWKGLKYNFQSLTRRLREILQ

SEQ ID NO: 68 - protein, 192 aa, synthetic construct
  REGION 1..192: note = cytidine deaminase polypeptide sequence
MADSSEKMRGQYISRDTFEKNYKPIDGTKEAHLLCEIKWGKYGKPWLHWCQNQRMNIHAEDYFMNNIFKAKKHPVHCYVTWYLSWSPCADCASKIVKFLEERPYLKLTIYVAQLYYHTEEENRKGLRLLRSKKVIIRVMDISDYNYCWKVFVSNQNGNEDYWPLQFDPWVKENYSRLLDIFWESKCRSPNPW

SEQ ID NO: 69 - protein, 280 aa, synthetic construct
  REGION 1..280: note = cytidine deaminase polypeptide sequence
MDPQRLRQWPGPGPASRGGYGQRPRIRNPEEWFHELSPRTFSFHFRNLRFASGRNRSYICCQVEGKNCFFQGIFQNQVPPDPPCHAELCFLSWFQSWGLSPDEHYYVTWFISWSPCCECAAKVAQFLEENRNVSLSLSAARLYYFWKSESREGLRRLSDLGAQVGIMSFQDFQHCWNNFVHNLGMPFQPWKKLHKNYQRLVTELKQILREEPATYGSPQAQGKVRIGSTAAGLRHSHSHTRSEAHLRPNHSSRQHRILNPPREARARTCVLVDASWICYR

SEQ ID NO: 70 - protein, 555 aa, synthetic construct
  REGION 1..555: note = pYY-BEM3.1; tr|F7B644|F7B644_HORSE polypeptide sequence
MPRGRARERQRRNPMEKLDAEAFSFHFLNMEFVYDRNCSYLCYQVEGRLSGSPVLSEQGVFPNEVCGKTRRHAELCFLDWFRGRLSPDEYYCVTWFISWSPCSNCAREVAEFLKRHRNVELSIFAARLYYCRDHEQGLQSLCNRGAQLAVMLRKDFTYCWDNFVHNSGREFSPWENIDANSDLLARKLEDLLKNPMEKLHRKTFSFHFRNLKFAKGRKCSYLCYRVEGRLSGSPGLSEQGVFLNEVCDENCRHAELCFLHWFRGRLSPHADYRVTWFISWSPCSNCAREVAEFLKQHRNVELHISAARLYYWQRNKPGLRNLRSSGAQLAIMFFWDFRDCWDNFVHNSGRHFIPWKKINVNSRLLATKLEDLLKNPLEKLHPNTFSFHFCNLEFAYDRKYSYLCYQVEGRLSGSPGLSEQGVFLNEVCGKTRCHAELCFLDWFRVRLSPDEYYRVTWFISWSPCFYCAREVADFLKQYRNVKLSIFAARLYYCRDHAQGLRSLCSSGAQLAIMFFWDFRYCWDNFVHNSGREFRPWKKINVNSRLLATKLEDILK

SEQ ID NO: 71 - protein, 437 aa, synthetic construct
  REGION 1..437: note = pYY-BEM3.2; tr|D1LZA1|D1LZA1_PANTI polypeptide sequence
MEPWRPSPRNPMDRIDPKTFRFQFPNLRYASGRKLCYLCFQVERDYFYYNDSDWGVFRNEVHPWAPCHAEQCFLSWFRDQYPYRDEDYNVTWFLSWSPCPTCAEEVVEFLEEYRNLTLSIFTSRLYYFWHPNYQEGLCKLWDAGVQLDIMSCDEFEYCWDNFVYHKGMRFQRRNLLKDYDFLAAKLQEILSPGQQRKRDWPFPPRPGAQVDPRSWVQEVTEPGINTRRHPLHLLVSFLLPRPTMNPLQEDIFYRQFGNQHRVPKPYYYRRKTYLCYQLKLPEGTLIDKDCLRNKKKRHAEICFIDKIKSLTRDTSQRFEIICYITWSPCPFCAEELVAFVKDNPHLSLRIFASRLYVHWRWKYQQGLRHLHASGIPVAVMSLPEFEDCWRNFVDHQDRLFQPWRNLDQYSESIKRRLGKILTPLNDLRNDFRNLKLE

SEQ ID NO: 72 - protein, 440 aa, synthetic construct
  REGION 1..440: note = pYY-BEM3.3; tr|A0A3Q0DM17|A0A3Q0DM17_TARSY polypeptide sequence
MPMKRMYSNIYFDHFNNQRLLSGQNAPWLCFKVERVENCMLVPLETGVFGNQVSGCCGKTERPVEPTSLTRSVLVSPNPGTELRAQQPSRKGHLGKLGCVEYPSPGLALVMLGYGASTYCPDSSMYCPETCHHPEMCFLYWFEKTLSHEEQYQITWYVSWSPCVNCAEEVAEFLSVHPKVNLTIYAARLYCYQKLNHRQGLRRLCKEGACVKIMNYEEFDHCWENFVYNNYKSFKPWVKLQDNYELLATELDKILRIPMERMPQKKFRFHFQNLIAKDRNTTWLCFEVKNVRKKHPPDLLERGIFQNQVTPRINCHAEMCFLSWFLENMLLHGKRYQVTWYISWSPCSICAEEVAEFLSAHPKVSLTIYAARLYYFWVPGYRQGLRRLVEEGARVEIMNYEEFDYCWENFVSINNEPFQPWEGLHEKYGYLVTKLNNILG

SEQ ID NO: 73 - protein, 453 aa, synthetic construct
  REGION 1..453: note = pYY-BEM3.4; tr|A0A3Q0DNJ5|A0A3Q0DNJ5_TARSY polypeptide sequence
MEDNPEPRPRQQMDQDTFIFNFNNDPSVRGRHQTFLCYEVEHLDDDTWVPQDKYLGFLHNQPQSRSNAYCAYHAELCFLELVSSWQLDPAQRYRVTCFISWSPCSSCAQEVAAFLKKNRHVTLRILAARIYDYYQGYEDGLRTLQGVGVDITVMTSAEFGHCWNTFVDHQGSPFQPWEGLDQHSQVIWQRMQDILQVIPAKYLMEKVKYTVTVDILFKGRVPGPRYLMDQNTFTRNFINNLSVSGRRQTLLCYEVERLGGDIWVPLDQLRGFLLSQARDVLNYYQGRHAEPCFLDLVSSWQLDPAQHYRVTWFISWSPCTSCAQAVAAFLRENRHVTLRILAARIYDYHQGYEEGLRTLQRTGAHIDIMTFKEFGHCWNTFVNHKGSPFKSWTGLDQHSQALRKRLQDILHTMASSLWDQSEPKKPIPSQEVTLPESIPPSHGNRFRLVKRPS

SEQ ID NO: 74 - protein, 424 aa, synthetic construct
  REGION 1..424: note = pYY-BEM3.5; tr|G5AYU5|G5AYU5_HETGA polypeptide sequence
FCFLSCVHRKPIERIYKKAFRFYFRNLRCAYGRNKTFLCYEVKRERDNKVLHKGVVLNQVEPYMPLHAELRFLSWFHDTLLCPLGSYQVTLYVSWSPCSECAEELTTFLAGHRNVTMTIYVAQLYYCNWKSPNREGLKILIAEDARLRVMFYDEFLYCWRNFVKNDYNNFDPWSLLDENSRYHNRILQNILKGWGRPHRVGPEGEQTATPGGSGGHCISVFSLLRRREMTLKEETFRVQFNNAYKAPKPYRRRVTYLCYQLQEANGDPLTKGCLRTKKGYHAESRFIKRICSMDLGQDQSYQVTCFLTWSPCPHCAQELVSFKRAHPHLRLQIFTARLFFHWKRSYQEGLQRLCRAQVPVAVMGHPEFAYCWDNFVDHQPGPFEPPWAKLEYYSSCLKRRLQQILRSWGVDDLTNDFRNLQLGP

SEQ ID NO: 75 - protein, 385 aa, synthetic construct
  REGION 1..385: note = pYY-BEM3.6; tr|A0A2Y9QMV5|A0A2Y9QMV5_TRIMA polypeptide sequence
MLSSPQTPGTRKPMKTLAPDEFSFNFENLRLAHGRNTTFLCFQVETKAPPSLNSPDSGIFQNQDHCPSHHHAEMVFLTWFQKRLSPAQHYEVTWYMSWSPCSRCAVQVAKFLKSNSTVNLSIFVARLYYPRELETKDGLHSLWQAGAQVQIMFFQDFKYCWENFVNNEGKPFQPWKNLDENSKDWDTELKDIHRNTTDLLTEEMFYSQFYNREKKSSIPRKTYLCYQLNEPQPVKRCLHYKKGYHAVTRFIDGIVSMNLDPARSYDITCYFTWSPCNRYARKLVSFIEDYPNLRLKVYTSRLYFHWCWTNMQGLQHLQNSRVTVAVMTFRDFEYCWKNFVDNQGKPFEPWEKLDLYSQSTERRLRRILKPLTPDVLNEDFGNLHL

SEQ ID NO: 76 - protein, 381 aa, synthetic construct
  REGION 1..381: note = pYY-BEM3.7; tr|H0XHI0|H0XHI0_OTOGA polypeptide sequence
LSCAFRDPMNRMYPKTFCQNFEKEPCPSNQNSSWLCFEVETKNSAVFFHRGVFRNQPAPPPRAPTSVLLSQGPVKTPCHAEECFLTWIQGVLPPDHHYHVTWYVSRGPCANCANLIVHFLAMHRRVTLTIFAAHLNFFWESDFQQGLLRMDQEGVQLHIMGYEEFEYCWDNFVYNQRKQFVPWNGLNENYEFMVSTLEDILRSPLDRIRQKDFSIHFRNSLWLDDKSTWLCFEVKRTKSPVPLYRGVFRNQSPPKTPCHAEVRFFTWLQDLPPDFCCQFTWYLSWSPCADCADLVANFLAKHRNVSLTIFVARLYYYRDPEMHRGLRRMYQEGANVDIMSVIEFEYCWDNFVYNQGKQFVPWNGLNENYEFLVPRLQEILE

SEQ ID NO: 77 - protein, 337 aa, synthetic construct
  REGION 1..337: note = pYY-BEM3.8; tr|A0A3M0K4Y7|A0A3M0K4Y7_HIRRU polypeptide sequence
MYISKKALRRHFDPRVYPRETYLLCELQWEGSRRVWIHWIRNVPDHHAEEYFLEEVFEPRNYGFCNITLYLSWSPCCTCCSKIRDFLKRNPNVKIDIRVARLIYPDYAETRSSLRELNGLQRVSIQVMEAAGLSCIESKNHRISQVERDPKGSSSPTLFTLQDHLKLSNMTESVIQDSVSIQICYQMRILGFQCHIRWKLQPEDFQRNYSPNQIGRVVYLLYEVRWRRGSIWRNWCSNNPEQHAEVNFLENHFHHRPQTPCSITWFLSTSPCGKCSRRILEFLKSQPNVTLEIYAAKLFRHHDIRNRQGLRNLMMNGVTIYIMNLEGNPASLCLSVD

SEQ ID NO: 78 - protein, 237 aa, synthetic construct
  REGION 1..237: note = pYY-BEM3.9; tr|A0A3P4LUZ8|A0A3P4LUZ8_GULGU polypeptide sequence
MSFEDYEYCWETFVDHKGMYFQSWDLLRDNDLLAAELKNILRSTMNPLRQEIFYHQFGNQPRAPRPYHRRKTYLCYQLQPHEGPITARVCLQNKKKRHAEIRFIDNIRALRLDRSQTFEITCYLTWSPCPTCAKALAVFVQDHPHISLRLFASRLFIHWCWKYQEGLRLLHRSRIPVAVMRLQEFEDCWRNFVDNQDEPFQPWNKLEQYSESITRRLRRILGHPQNNLENDFRNLHI

SEQ ID NO: 79 - protein, 221 aa, synthetic construct
  REGION 1..221: note = pYY-BEM3.10; tr|G5BPM8|G5BPM8_HETGA polypeptide sequence
RRRIEPWQFEASFDPRQLRRETCLLSEVRWGTSPRAWRGCSLNTARHAEVSFMDRLTSEGRLRGPVRCSITWFLSWSPCGACAQAIGEFLRQHPNVSLVIYIARLFWHVDEQNRQGLRDLVTRGVRMQVMSDPEFAHCWRNFVNYSPGQEARWPQVPPVWTWLYSLELHCILLNLPPCLKISRRHHNQLTFFQLILQNCHYQAIPSPVLLASGLIHPFVTW

SEQ ID NO: 80 - protein, 211 aa, synthetic construct
  REGION 1..211: note = pYY-BEM3.11; tr|H2M862|H2M862_ORYLA polypeptide sequence
MITKLDSVLLPKKKFIYHYKNMRWARGRHETYLCFVVKRRVGPESLSFDFGHLRNRNGCHVELLFLRHLSALCPGLWGYGATGQGRVSYSITWFCSWSPCANCSFRLAQFLSQTPNLRLRIFVSRLYFCDLEDSREREGLRMLKKVGVHITVMSYKDYFYCWQTFVARKQSKFKPWDGLHQNSVRLSRKLNRILQPCETEDFRDAFKLLGL

SEQ ID NO: 81 - protein, 353 aa, synthetic construct
  REGION 1..353: note = pYY-BEM3.12; tr|H0Y0C6|H0Y0C6_OTOGA polypeptide sequence
MYLKTFYRHFNNRPYLSRRNDTWLCFEVKTTSSNSPGSFYSGVFRNQGPRYCPWHTELCFLTWVRPIVSHHHFYQITWYMSWSPCANCAWQVATFLATHENVSLTNYTVRIYYFWRQDYRQGLLRMIEEGTQVYVMSSKEFQHCWENFVDHWGTRWVTCWNRLKKNYEFLVTRLSEILSDPKERISPNTFYNQFNNTPVPRGRKDTWLCFEVKEKNSNSPGSFHRGVFQNQVFSGTSSHARRCPPDHHYEVTWYTSWSPCAHCAWHVVNFLTSNPNVSLTIFAARLYYIYRPEIQQGLRRVFQEGAKVHIMSLKEFKYCWAKLVYNSGMRFMPWYQFNFNFLFPNTTLKGDLH

SEQ ID NO: 82 - protein, 189 aa, synthetic construct
  REGION 1..189: note = pYY-BEM3.13; tr|A0A3Q2Z5X6|A0A3Q2Z5X6_HIPCM polypeptide sequence
MDVHFMNFIYHYKNMRWAKGRNETYLCFVVKRRVGPNSLTFDFGHLRNRNGCHVELLFLRYLGRRLSYSITWFCSWSPCANCSAALSQFLSRMPNLRLRIFVARLYFCDMEDSHEREGLRLLQKAGVQVTVMSYKDYYYCWQTFVDRKKSHFKAWEDLHQNSVRLSRKLNRILQPCEMDLRDAFKLLGL

SEQ ID NO: 83 - protein, 190 aa, synthetic construct
  REGION 1..190: note = pYY-BEM3.15; tr|A0A2K6NY90|A0A2K6NY90_RHIRO polypeptide sequence
MNPHIRNPMEAMYPGTFYFHFKNLWEADNRNESWLCFAVEVIKHHSTVSWKRGVFRNQVDPETHCHAEKCFLSWFCDNTLSPKKNYQVTWYTSWSPCPECAREVAKFLARHSNVMLTIYTARLYYSQYPNYQEGLRRLNEEGVPVEIMDYEDFKYCWENFVYNGDELFKPWKGLKYNFLFLDSKLQEILE

SEQ ID NO: 84 - protein, 202 aa, synthetic construct
  REGION 1..202: note = pYY-BEM3.16; tr|Q6ICH2|Q6ICH2_HUMAN polypeptide sequence
MNPQIRNPMERMYRDTFYDNFENEPILYGRSYTWLCYEVKIKRGRSNLLWDTGVFRGPVLPKRQSNHRQEVDPETHCHAERCFLSWFCDDILSPNTNYEVTWYTSWSPCPECAGEVAEFLARHSNVNLTIFTARLCYFWDTDYQEGLCSLSQEGASVKIMGYKDFVSCWKNFVYSDDEPFKPWKGLQTNFRLLKRRLREILQ

SEQ ID NO: 85 - protein, 202 aa, synthetic construct
  REGION 1..202: note = pYY-BEM3.17; tr|G8GPV1|G8GPV1_CERNE polypeptide sequence
MDGSPASRPGHVMDPGTFTSNFNNKPWVSGQRETYLCYKVERSHNDTWVLLNQHRGFLRNQAKNRLHGDYGCHAELCFLGEVPSWRLDPTQTYRVTWFISWSPCFSGGCAEQVRAFLQENTHVRLRIFAARIYDYDFLYQEALRTLRDAGAQVSIMTYEEFKHCWDTFVDHQGRPFQPWDGLDEHSQALSGRLQAILQNQGN

SEQ ID NO: 86 - protein, 181 aa, synthetic construct
  REGION 1..181: note = pYY-BEM3.18; tr|Q1WBT6|Q1WBT6_SYMSY polypeptide sequence
MALLTAKTFRLQFNNKRRVTKPYYPRKALLCYQLTPQNGSTPTRGYFKNKKKRHAEIRFINKIKSMGLDETQCYQVTCYLTWSPCPSCAWELVDFIKAHDHLNLGIFASRLYYHWCRHQQEGLRLLCGSQVPVEVMGFPEFADCWENFVDHEEPLSFNPSEMLEELDKNSRAIKRRLEKIK

SEQ ID NO: 87 - protein, 211 aa, synthetic construct
  REGION 1..211: note = pYY-BEM3.19; tr|A0A3B4CS14|A0A3B4CS14_PYGNA polypeptide sequence
MDNTNRRKFIYHYKNVRWARGRHETYLCFVVKKRNSPDSLSFDFGHLRNRNGCHVELLFLRYIEVLCPGLWGSGVDGVRVSYAVTWFCSWSPCSNCAQRLTNFLSQTPNLRLRIFVARLYFCDEEDSLEREGLRHLQRAGVQITVMTYKDFFYCWQTFVASRERCFKAWEGLRQNSVRLSRKLNRILQVFISTPVISPLITTHLGQSWAGG

SEQ ID NO: 88 - protein, 315 aa, synthetic construct
  REGION 1..315: note = pYY-BEM3.20; tr|A0A087XZI4|A0A087XZI4_POEFO polypeptide sequence
RKVSYSVTWFCSWSPCANCSIRLAQFLHQTPNLRLRIFVSRLYFCDLEDSREREGLRILKKAGVHITVMSYKDYFYCWQTFVAKSQSKFKPWDGLHQNYIRLSRKLNRILQPALDIKKFIYHYKNLRWARGRCETYLCFVVKKKLHLFMFVIVGRNRLFDLNVTMNNKSLYLIPLHLQLLFLRHLGALCPGLWGYGVTGERKVSYSVTWFCSWSPCANCSIRLAQFLHQTPNLRLRIFVSRLYFCDLEDSREREGLRILKKAGVHITVMSYKDYFYCWQTFVAKSQSKFKPWDGLHQNYIRLSRKLNRILQVQFF

SEQ ID NO: 89 - protein, 189 aa, synthetic construct
  REGION 1..189: note = pYY-BEM3.21; tr|A0A341AEK4|A0A341AEK4_9CETA polypeptide sequence
MASDRGPSAGDATSRRRIEPWEFEVSFDPRELCKETRLLYEIKWGRSQHVWRHSGKNTTNHVECNFIEKFTSERPFHRSVSCCITWFLSWSPCWECSKAIREFLNQHPRVTLFIYVARLFQHMDPQNRQGLRDLIHSGVTIQIMGPTEYDYCWRNFVNYPPGKEAHWPRYPPPLMKLYALELHCIILVP

SEQ ID NO: 90 - protein, 180 aa, synthetic construct
  REGION 1..180: note = pYY-BEM3.22; tr|E2D879|E2D879_MUSMI polypeptide sequence
RNLISRETFNFNFENLCYAKGRKNTFLCYEVTRKDCDSPVSLCHGVFKNKGSIHAEICFLYWFHDKVLKVLTPREEFKVTWYMSWSPCFECAEQVVRFLATHHNLNLTIFSSRLYNVSDPDTQQKLCRLVQEGAQVAVMDLSEFKKCWEKFVDNDGQQFRPWKRLRTNFRYQNSKLQEIL

SEQ ID NO: 91 - protein, 221 aa, synthetic construct
  REGION 1..221: note = pYY-BEM3.23; tr|A0A2K5RDN6|A0A2K5RDN6_CEBCA polypeptide sequence
MWEAQSPGLSREWGSVAISPEDPGPLHIGRFLSCAFRHPMNAMYPGIFNFHFRNLRKAYGRNETWLCFTVEGIMNRSTVSWKSGVFRNQVGSDPFCHAEMCFLSWFRHNMLSPKKDYEVTWYASWSPCPECAGQVAEFLARHGNVRLTIFTAHLYYFWNPSFRQGLRRLSQEGASVLIMGYEDFEYCWDNFVYNDGQPFKPWKRLQDNSLSLYITLQEILQ

SEQ ID NO: 92 - protein, 206 aa, synthetic construct
  REGION 1..206: note = pYY-BEM3.24; tr|A0A2K5RDN7|A0A2K5RDN7_CEBCA polypeptide sequence
MEASPASRPRPLMGPRTFTENFTNNPEVFGRHQTYLCYEVKCQGPDGTRDLMTEQRDFLCNQARNLLSGFDGRHAERCFLDRVPSWRLDPAQTYRVTCFISWSPCFSCAREVAEFLQENPHVNLRIFAARIYDCRPRYEEGLQMLQNAGAQVSIMTSEEFRHCWDTFVDHQGHPFQPWEGLDEHSQALSRRLQAILQGNRWMILSL

SEQ ID NO: 93 - protein, 184 aa, synthetic construct
  REGION 1..184: note = pYY-BEM3.25; tr|A0A1C9CJ69|A0A1C9CJ69_CERAL polypeptide sequence
NPMKAMDPHIFYFHFKNLRKAYGRNETWLCFAVEIIKQRSTVPWRTGVFRNQVDPESHCHAERCFLSWFCEDILSPNTDYRVTWYTSWSPCLDCAGEVAEFLARHSNVELAIFAARLYYFWDTHYQQGLRSLSEKGASVEIMGYEDFKYCRENFVCDDGKPFKPWKGLKTNFRFLKRRLQEILE

SEQ ID NO: 94 - protein, 197 aa, synthetic construct
  REGION 1..197: note = pYY-BEM3.26; tr|A0A2R2Z4D2|A0A2R2Z4D2_PTEAL polypeptide sequence
MHLQVWRKVTEAWREGYTLKPWSRNPMERLYHDYFYFHFYNLPTPKHRNGCYICYQVEGTKKHSRMPLLRGVFENQESLDMMLSPGEKYRVTWYISWSPCFACVDEVIKFLREHTNVELIIFAARLYHSDILQYRQGLRKLHDAGVHVAIMSYYEFKHCLNDFVFHQGRSFCPWNDLNKNSKNLSNTLEDILRNQED

SEQ ID NO: 95 - protein, 206 aa, synthetic construct
  REGION 1..206: note = pYY-BEM3.27; tr|B7T161|B7T161_SHEEP polypeptide sequence
MTEGWAGSGLPGRGDCVWTPQTRNTMNLLRETLFKQQFGNQPRVPPPYYRRKTYLCYQLKELDDLMLDKGCFRNKKQRHAEIRFIDKINSLNLNPSQSYKIICYITWSPCPNCASELVDFITRNDHLNLQIFASRLYFHWIKPFCRGLHQLQKAGISVAVMTHTEFEDCWEQFVDNQLRPFQPWDKLEQYSASIRRRLQRILTAPT

SEQ ID NO: 96 - protein, 205 aa, synthetic construct
  REGION 1..205: note = pYY-BEM3.28; tr|A0A2R2X2G4|A0A2R2X2G4_PTEAL polypeptide sequence
MAGLGQACEGCCGQMPEISYPMGRLDPKTFSFEFKNLPYAYGRKSSYLCFQVEREQHSSPVPSDWGVFKNQFCGTEPYHAELCFLNWFRAEKLSPYEHYDVTWFLSWSPCSTCAEEIAIFLSNHKNVRLNIFVSRIYYFWKPAFRQGLQELDHLGVQLDAMSFDEFKYCWENFVDNQGMPFRCWKKVHQNYKSVLRKLNEILRRR

SEQ ID NO: 97 - protein, 309 aa, synthetic construct
  REGION 1..309: note = pYY-BEM3.29; tr|G1Q1M4|G1Q1M4_MYOLU polypeptide sequence
YAELSFLDLFQSWNLDRGRQYRLTWYMSWSPYPDCAQKLVEFLGENSHVTLRIFAADIHSLCSGYEDGLRKLRDARAQLAIMTRDELQYCWVTFVDNQGQPFRPWPNLVEHIKTKKQELKDILGNPMRRMYPKTFNFNFQNLNSYGRKSTFLCFEVETWEDGSVLDYQNGVFQNQLDPGHAELCFIEWFHEKVLFPDEVRCPDAQYHVTWYISWSPCFECAEQVAGFLNEHENVDLSISAARLYLCEDEDEQGLQDLVAAGAKVAMMAPEDFEYCWDNFVYNRGWPFTYWKHVRRNYGRLQEKLDEILW

SEQ ID NO: 98 - protein, 216 aa, synthetic construct
  REGION 1..216: note = pYY-BEM3.30; tr|A0A1S3AN78|A0A1S3AN78_ERIEU polypeptide sequence
RRIEPWEFEDFFDPRQFRPETCLLYEVRWGSSRNAWRSTARNTTRHAEVNFLERFAAERHFDKPVSCSITWFLSWSPCWECSQAIGAFLSQHPQVTLAIHVTRLFHHEDEQNRQGLRDLLARGVTLQVMGDSEYAHCWRTFVNSPPGAEGHYPRYPSDFTRLYALELHCIILGLPPCLEILRRYQNQFTLFRLVPQNCHYQMIPHLNFFVVRHYFF

SEQ ID NO: 99 - protein, 201 aa, synthetic construct
  REGION 1..201: note = pYY-BEM3.32; tr|Q4VUI3|Q4VUI3_XENLA polypeptide sequence
MTMDSMLLKRNKFIYHYKNLRWARGRHETYLCYIVKRRYSSVSCALDFGYLRNRNGCHAEMLFLRYLSIWVGHDPHRNYRVTWFSSWSPCYDCAKRTLEFLKGHPNFSLRIFSARLYFCEERNAEPEGLRKLQKAGVRLSVMSYKDYFYCWNTFVETRESGFEAWDGLHENSVRLARKLRRILQPPYDMEDLREVFVLLGL

SEQ ID NO: 100 - protein, 191 aa, synthetic construct
  REGION 1..191: note = pYY-BEM3.33; tr|E2RL86|E2RL86_CANLF polypeptide sequence
MNPLQEETFYQQFSNQRVPKPTYQRRTYLCYQLKPHEGSVIAKVCLQNQEKRHAEICFIDDIKSRQLDPSQKFEITCYVTWSPCPTCAKKLIAFVNDHPHISLRLFASRLYFHWRQKYKRELRHLQKSGIPLAVMSYLEFKDCWEKFVDHKGRPFQPWNKLKQYSESIGRRLQRILQPLNNLENDFRNLRL

SEQ ID NO: 101 - protein, 226 aa, synthetic construct
  REGION 1..226: note = pYY-BEM3.34; tr|G1LWB0|G1LWB0_AILME polypeptide sequence
SSAAPASIHLLDEDTFTENFRNDDWPSRTYLCYKVEGPDQGSGVPLGQDKGILHNKPAQGPEPSRHAECYLLEQIQSWNLDPKLHYGVTCFLSWSPCAKCAQKMARFLQENSHVSLKLFASRLYTRERWDEDYKEGLRTLKRAGASIAIMTYREFEHCWKTFVLHDQEGSCFQPWPFLHKESQKFSEKLQAILQVGVLLLSLPPPLPSSPLSSPWPFPAPLRASTG

SEQ ID NO: 102 - protein, 238 aa, synthetic construct
  REGION 1..238: note = pYY-BEM3.35; tr|A0A1U7S7K7|A0A1U7S7K7_ALLSI polypeptide sequence
MGEHWQYAGSGEYIPQDQFEENFDPSVLLAETHLLSELTWGGRPYKHWYENTEHCHAEIHFLENFSSKNRSCTITWYLSWSPCAECSARIADFMQENTNVKLNIHVARLYLHDDEHTRQGLRYLMKMKRVTIQVMTIPDYTYCWNTFLEDDGEDESDDYGGYAGVHEDEDESDDDDYLPTHFAPWIMLYSLELSCILQGFAPCLKIIQGNHMSPTFQLHVQDQEQKRLLEPANPWGAD

SEQ ID NO: 103 - protein, 220 aa, synthetic construct
  REGION 1..220: note = pYY-BEM3.36; tr|A0A2R2X2J8|A0A2R2X2J8_PTEVA polypeptide sequence
MPRIGNMNLLSEKTFNYHFGNQLRVKKPQGRRRTYLCYKLKLPNETLVKGYFINKKKNHAEIRFINKIRSLNLDQTQSYKITCYITWSPCSYCAGKLVALVKSCPHLSLQIFTSRLYYHWLWKNQAGLRYLWKINISVLVMKEPEFADCWDNFVNHQSRRFKPWEKLTQYSNSTERRLLRILRINRTDLFLAQSSEQDPGLNDLVDAIKRLFLDAHRPRD

SEQ ID NO: 104 - protein, 198 aa, synthetic construct
  REGION 1..198: note = pYY-BEM3.37; tr|A0A151P6M4|A0A151P6M4_ALLMI polypeptide sequence
MAVEEEKGLLGTSQGWKIELKDFQENYMPSTWPKVTHLLYEIRWGKGSKVWRNWCSNTLTQHAEVNCLENAFGKLQFNPPVPCHITWFLSWSPCCQCCRRILQFLRAHSHITLVIKAAQLFKHMDERNRQGLRDLVQSGVHVQVMDLPDYRYCWRTFVSHPHEGEGDFWPWFFPLWITFYTLELQHILLQQHALSYNL

SEQ ID NO: 105 - protein, 158 aa, synthetic construct
  REGION 1..158: note = pYY-BEM3.38; tr|A0A2K6MNR2|A0A2K6MNR2_RHIBE polypeptide sequence
IWLCFTMEIIKQCSTVSWKRGVFRNQVDPETHCHAERCFLSWFWEDTLSPNTNYQVTWYTSWSPCLDCAGEVAEFLARHSNVKLAIFAARLYYFWDTDYQQGLRSLSEEGTSVEIMGYEDFKYCWENFVYNGDEPFKPWKGLKYNFLFLDSKLQEILE

SEQ ID NO: 106 - protein, 182 aa, synthetic construct
  REGION 1..182: note = pYY-BEM3.40; tr|F1CGT0|F1CGT0_ANOCA polypeptide sequence
KAAILLSNLFFRWQMEPEAFQRNFDPREFPECTLLLYEIHWDNNTSRNWCTNKPGLHAEENFLQIFNEKIDIKQDTPCSITWFLSWSPCYPCSQAIIKFLEAHPNVSLEIKAARLYMHQIDCNKEGLRNLGRNRVSIMNLPDYRHCWTTFVVPRGANEDYWPQDFLPAITNYSRELDSILQD

SEQ ID NO: 107 - protein, 230 aa, synthetic construct
  REGION 1..230: note = pYY-BEM3.41; tr|C7AGG3|C7AGG3_HORSE polypeptide sequence
MDPQAPTQRGGLGQAYQGGDYVQAPGNGNTQHLLSEDVFKKQFGNQRRVTKPYYRRKTYVCYQLKLLRGPTIAKGYFRNKKKRHAEIRFIDKINSLGLDQDQSYEITCYVTWSPCATCACKLIKFTRKFPNLSLRIFVSRLYYHWFRQNQQGLRQLWASSIPVVVMGYQEFADCWENFADNRGNPFQSWEKLTEYSKGIKRRLQKILEPLNLNGLEDAMGNLKLGSVDLG

SEQ ID NO: 108 - protein, 197 aa, synthetic construct
  REGION 1..197: note = pYY-BEM3.42; tr|A0A250YMK7|A0A250YMK7_CASCN polypeptide sequence
MSLLKEDIFLYQFNNQQQVQKPYFRRRTYLCYQLEQPNGSRPQWPAKGCLQNKKGHHAEIRFIKRIHSMGLEQDQDYQITCYITWSPCLACACALAELKNHFPRLTLRIFASRLYFHWIRKFQMGLQHLYKSGVLVAVMSLPEFTDCWEKFVNHRQVFFTPWDKLEEHSRSIQRRLRRILQSWDVDDLTDDFRNLRL

SEQ ID NO: 109 - protein, 189 aa, synthetic construct
  REGION 1..189: note = pYY-BEM3.43; tr|B7T160|B7T160_SHEEP polypeptide sequence
MPWISDHVARLDPETFYFQFHNLLYAYGRNCSYICYRVKTWKHRSPVSFDWGVFHNQVYAGTHCHSERRFLSWFCAKKLRPDECYHITWFMSWSPCMKCAELVAGFLGMYQNVTLSIFTARLYYFQKPQYRKGLLRLSDQGACVDIMSYQEFKYCWKKFVYSQRRPFRPWKKLKRNYQLLAAELEDILG

SEQ ID NO: 110 - protein, 541 aa, synthetic construct
  REGION 1..541: note = pYY-BEM4.1; tr|A0A182D0J1|A0A182D0J1_BLAVI polypeptide sequence
MTNPESPPQAPCDFNEDALLNREPLRGSPIKFVSPVDYPDLVFALAGPVGVDIDYIQQSISDCLKSFDYSTEFIRITEIMQDIKCSKTIDCTDMLKEYQSKIEYANELRRAYRAKDLLAALTISAISKLREQIKERDEATNKSNIQPSRRKLAWVVRQLKTPEEVRLLRAVYGKQFVLVSIYSSPQRREDFLISKIKIKSRGTIDNNTSSEGAQRLIERDSKEDNEYGQNLSGTFCLGDIFVDSNNKESAIVSIDRFLNAFFGSNEISPTRDEYGMYLAKTASLRSCDLSRQVGAAIFSKTGEIISLGSNEVPKAGGGTYWTGDNADSRDIRLGHDPNEINKVEIFAEIISRLLEDKLLSNDLLNKDAASIVTILLSKNEGKRYKDLRVMDIIEFGRIIHAEMSAICDAARNGRAIIGATLFCTTFPCHLCAKHIVASGIGRIVYLEPYPKSYAKKLHSDSIQVEDHSDSEKVSFEPFIGISPSRYRELFEGGRRKDPFGEALKWKNDPRKPVIDVVVPPHFEAEKLVIAQLGKLIVSGTG

SEQ ID NO: 111 - protein, 330 aa, synthetic construct
  REGION 1..330: note = pYY-BEM4.2; tr|A0A2D6EXD2|A0A2D6EXD2_9ARCH polypeptide sequence
MIIGLVGTIGAGKQTIIDYLQEKYGYNALSCSDVLREILKKQGKPVTRDNLREIGNKTREEGGNGAIAKILLEKLRNNWKANYIVDSLRHPDEVSVLRTSPLFHLVAVDADLRIRFERVKARKREEEPTTLPAFVERDQKEMFGTGNEQRIRETMELADELVLNNGTVEELKQRIDDLNLVSDERLRPSWDDYFMRLARLAAQRSNCMSRKVGAIITKDRRVIATGYNGTPRGVKNCNEGGCERCNSAVAKGTAISECLCLHGEENAIIEAGRVRSEGATIYTSFLPCLWCTKMIIQAGLKEVVFSEVYDLHEASIKLFETSGVLIRRLK

SEQ ID NO: 112 - protein, 367 aa, synthetic construct
  REGION 1..367: note = pYY-BEM4.3; tr|F7YVM7|F7YVM7_9THEM polypeptide sequence
MNEFKYMSLALKLAKKGKYTTSPNPMVGAVIVKDGKILATGYHKKAGQPHAEINALSKLNFQAQNCEMYVTLEPCSHYGRTPPCADAIIRSGIRKVVIATLDPNPLVNGKGVEKLKNAGIEVVCGVLEEKAKKLNEKFFKYITTKIPFVALKIAQTLDGKIALKNGESKWITSEKSREYVHKLRMEYDAVLTGIGTILKDDPQLNVRLKKVYKQPLRIILDSKLKIPLSAKVLEDPSKVIILTTALADKEKLEELRSKGVEVIITNEKNGIVDLESALKILGEKKITSVMVEAGPTLLTSFLKESLFDKIYLFIAPKIFGADSKSVFSELGLEDISKSQKFSLESVKKIGEDLLLELYPKQLKKLEE

SEQ ID NO: 113 - protein, 449 aa, synthetic construct
  REGION 1..449: note = pYY-BEM4.4; tr|A0A3M6UNF1|A0A3M6UNF1_9CNID polypeptide sequence
MEEKSELENELMRSTSPKPSVPNGSKGNECEQRETRITKENLYMVLALWMEEFPVVEQTSSAKRLNKVGVVFVLPTDRVLAADCSRDGVHGVARVMVNHCGKLEGCKVFVSRKPCSLCAKLLVQSKVSRVFYLPIEPESENKGEIARADNLFKNSSVGQSVFVPCVEQKVLDKLEDKLPKEIITPDDISECRDNLLKKCGWSAEWFARAQASLPWPCFEGKMKSQVDNDFKSLIKWIAVVKAPMDKGVAFPKVKLTSDSRVVPDCDADNFPDSKTAYHMMIFAKMLARQTDDPKTGVGAVIVRGKVPDIVSLGWNGFPSKALYGEFPRASDDDRALQKKFPYVIHAEQNALMVRNVKDLTDGILFVTKPPCDECAPMIKLSGVKTIVIGEKIEKSRGGELSYNLIKEYIKEGIMTCYQMEATKTKAKRLASDPETRKRLKSSCSNSNDV

SEQ ID NO: 114 - protein, 414 aa, synthetic construct
  REGION 1..414: note = pYY-BEM4.5; tr|A0A2G3K826|A0A2G3K826_9BURK polypeptide sequence
MTKIIDDVNTAAAAVLDQATAAANQTTFAVGGVMVNNQTGEVISAIHNNVIIPLSNNVSFTFDPTAHGERQLVYWYYANKEALKLPEPNQITVITSLDPCAMCTGALLTAGFNVGVVAIDTYAGINCAQNFQFATLPANLRTKAQKNFGYYASGAANFKPLTRSYVGGPSVAFKNGVVTPANLRDCGTVFTQSVDTVRNTSNSTGLAPSQMSNPAELPSNSAILQAYRAIYKKAFTIKIDNPRLPDAQILTELKAVLADAPNARNAVAFIDPFGNLVLCMADAFNTSPVHAAFMNVTQEYAKTRWDLMNKYAQASTTDNPALYLTHPKYGTFVYLYAPDPDDSITIMSLGAYGSTMEGPIPNMFPSNLQFYYPPRNGAQFSELVPVVNELPPFYTQNVNISLMQVPGVTQAPTK

SEQ ID NO: 115 - protein, 308 aa, synthetic construct
  REGION 1..308: note = pYY-BEM4.6; tr|K1ZCJ4|K1ZCJ4_9BACT polypeptide sequence
MSSRAKKNRSTNLKKSIGQKSIENKPTDQKKDQVLVAYVPVIHEGYRRFFRHFPAVKELWLISQELSHELRSLQKDIRALKASETKKLLQTWGQFQKIKLLTPSSLAILQKTTTQLVFPDEEISHHLVEKYFAQNRVLFASFFLRWDKKSSLKKHDLQEYSEISNKEFDQMMIAIAQQEADKSDDWWRQVGGLIFKDETILLLAHNQHTPTEAEAYFAGDPRADFHQGEYLKISTAIHAEAYLIAQAAKQGISLEGADLYVTTFPCPVCAKQVAYSGIKRVFFREGYSLLDGETILKANGVKLIRVTV

SEQ ID NO: 116 - protein, 615 aa, synthetic construct
  REGION 1..615: note = pYY-BEM4.7; tr|A0A1G3PNQ8|A0A1G3PNQ8_9SPIR polypeptide sequence
MRDLPLLVLGLTGPMGAGCTRFARDISKMEPGKVIKKQGLLDQVAHEISELSKKASEIRLQCISNGKNSELAELKRLNRRLNAKLAERACLHVIAKSSLPEPLFISLNTIVIKIAVDSITAPEFAEWAKNHAKVADLLKWLRTQWESELTLYETWGQDAGRFSQDELEKMDAMFAEFERIGDEILKEDFETYFGKRNNDFSIRMFSENIRLSGNPFRPAENGGGGGKYDEPSMVMIARETDRYIRFYRTRSDQKRSHFFIIDEIKNPREAEYFRARHQNFFLVSIFSSSEIRASRMRRGLGHDAGVSDADFQHLFRELDSRDWGADDFDAHGLHRQNIYRCFNLADIAINNDVEDERFSEVLFNKFIRYYALMLSPGCVQPTPQETYMHLAYSLSLRSTCISRQVGAVITDLEDRILSLGWNEVPEGQIGCGLKVKKDYTDKENPLFEMEIWDNVITAEDLAVWDDEDSICVKDILSRIEIKTKLKSVSLTPEERADVLKALRIKRLEYSRSLHAEENAILQVASRGGVGLKDGTIYVTTFPCELCSKKIYQVGISKIYYTEPYPNSISEKVILKDGIRNIKILQFEGVKSYSYFKLFKPGFDKKDAQMLEGRGI

SEQ ID NO: 117 - protein, 291 aa, synthetic construct
  REGION 1..291: note = pYY-BEM4.8; tr|A0A1G0PGF4|A0A1G0PGF4_9BACT polypeptide sequence
MKHNNQLRKEIEKLLGQNSIIKNDELKKLQKEYKIETDELLISFLPYAAEFAKVPISKYKVGAVVLGKSGNIYFGSNMEFEAGALSATVHAEQSAVNNAWLNGETGINKIAVTAAPCGYCRQFLNELTTAKQLHVLLKDKNLEAAKVFKLTELLPEAFGPRDLEIEGGLMKVENHKLKIENINDELINAALEAANKSYAPYSKNYSGVSIQLSDGTIFSGRYSENAAYNPSLLPFQSALAFMNMNTKKGSNNKIVDAVLVEAVSNISQKDAAGTLLNSISKTKLRYYKIKN

SEQ ID NO: 118 - protein, 398 aa, synthetic construct
  REGION 1..398: note = pYY-BEM4.9; tr|A0A0P4WGY5|A0A0P4WGY5_9EUCA polypeptide sequence
MEENSSATSQPKCASRTKQGGNDLSTDMSNLSVGETKRTDFLPWDDYFMAVAFLSAMRSKDPSSQVGACIVNADKKIVGIGYNGMPIGCSDDELPWNKESLDPLQTKYMYVCHAEMNAIMNKNSSDLAGCCVYVALFPCNECAKLVIQAGIREVVFFSDKHQQKPETVASKKMLNMAGVAYRQYTPSQSKIELNLSLKEQEKSEPTADITQSSERDQNSKRKDYLSWEEYFMAMAHLSALRSKDPITQVGACIVNSKKKIVGIGYNGMPLGCNDDLMPWGNSSSNKLETKYMYVCHAGVNAIMNKNSCDVSGCTLYVALFPCNECAKVIIQAGIKTIIYASDTNKDQASILASKKMLDMAGIKYRADNLSQRKIVIDFKTIDWNSRFMNDHQNDPTCL

SEQ ID NO: 119 - protein, 259 aa, synthetic construct
  REGION 1..259: note = pYY-BEM4.10; tr|A0A3D8IG27|A0A3D8IG27_9HELI polypeptide sequence
MRKNILYFILTLFFLSGLYATSLPEDNVVSGVIYEKIDTVSAEVDHIYPMLALAIVYKDWQEKNMLNKQGHNIGLVIVDENNMPVFWVRNSVHATHNGTQHGEVRLVSNLLNCEGFNKYLDKYTLYTTLEPCIMCAGMLSMVQIPKVVYAQKDLSCGNTQEIISTAKYPRYYKAFTVENGYKKDLEECFEQYKICKNDSITDFLVNDSAKEIFRKASNDLQDYKVKFKENRRVIKVAQEFLQNIQTKDNLDVLQCPKNM

SEQ ID NO: 120 - protein, 256 aa, synthetic construct
  REGION 1..256: note = pYY-BEM4.11; tr|A0A351C8C4|A0A351C8C4_9BACT polypeptide sequence
MNELTKQSEHLRNEALRIATRSYVPYTGQQEGVIILLENGDLIPGVRVENASFQLTIPALQNALSTMYALQRTDISMIVSSIPFTDSDLAYTGGMAEIAWEMVGASLLLVAGAHIPEAGTFIDPARGENLLDVSREAALNAFIPESDFPVGSAIQTSDDVVIDGCNVEHSDWSKIICAERNVLSTARSYGLGQITTIYVSCPKEPGGTPCGACRQVIVELAPDATVWMDRGNQEPIAMKATKLLPGHFTGNVLKKQ

SEQ ID NO: 121 - protein, 301 aa, synthetic construct
  REGION 1..301: note = pYY-BEM4.12; tr|A0A1G6V2K7|A0A1G6V2K7_PEPNI polypeptide sequence
MPIVRVNEIGARLPEDWEALETAIWQAYVSREDLPDAGELDLTLVDDATIQELNKTHRQLDKSTDVLSFPMYDDRDDLAADVQAGLPVILGDIMISVPTAERQAQAYGHSFKREMAYLLVHGLLHIAGYDHMSAEEKSAMRRAEEAILADVDVPRDTAPSKTAAVLDEADVQALIDAARAARLQAYAPYSGYAVGAALLAADGRRFCGVNVENASYGATCCAERTALFAAVTAGARDFIALALVTEGDEPAPPCGLCRQALAEFSPDLAIYLAGPTGETYRRTSLAALFPEAFSLSTKESV

SEQ ID NO: 122 - protein, 528 aa, synthetic construct
  REGION 1..528: note = pYY-BEM4.13; tr|F2NP91|F2NP91_MARHT polypeptide sequence
MPVMETHALEARFKEALARLCPEGRLLAAVSGGGDSVALLYLLKAAGRDTIVAHLDHALRPDSAADAAFVEKLAQRLGFPLETEHVDVRALAHRKRINLEAAAREVRYAFLARVARRWKARCILTAHTLDDNAETVLLQILRGAGRGLGIRPLQRRVARPLLEFSRAELRAYLEARGARWLEDPTNRSLELDRNYLRHAVLPRITARFPHALEALARFSQAQQADDWALEALSARHLIPDRRWPVPAYRALPLERAPEALRRRAIRGVLEALGVRPEARLVADVEAALGGRAQTLPGGVVVRRQRGTLFFIPPTVRFPKVQPPAGLEARPPRPGDYLVFPYGRKRLVDFLNERGVPRELKRRWPVGAVGAEVRWVYGLWPEPDEDRYMRRALVLARAAARQGEVPIGAVLVRDGAVLAEAANAVEASRDATAHAELLALRTALRRVGEKVLPGATLYVTLEPCPMCYGAILEARVARVVYGVENLKAGAFTVHGLEPRVALEAGRVEGECAKVLKDFFARLRPGRDGA

SEQ ID NO: 123 - protein, 226 aa, synthetic construct
  REGION 1..226: note = pYY-BEM4.14; tr|A0A316TX77|A0A316TX77_9BACT polypeptide sequence
MINGYTPYSGNQNTCYVKGESGTFYPGVRIENVSYPLTISSVQAAVCSCLANSDNPVEYYTGDHQPELLQVWADEYDMKPGGKLPDSPLKLFDPLVPSIPDIKKELDVLTEKSVTPNSGFPVSALLQTEKGYIRGVNIELSSWALGLCAERVAISRALTAGYTQFKSIHIYAPEADFVSPCGACRQVLLEVMPDADTELYHGDGTLSKHIVSDLLPFGFTSHKLKK

SEQ ID NO: 124 - protein, 321 aa, synthetic construct
  REGION 1..321: note = pYY-BEM4.15; tr|R6VYG3|R6VYG3_9FIRM polypeptide sequence
MIHKGTQTIETKRLILRAFTPDDAEAAFENWMSDPKVTEFLRWKTHADISDSRKIVNEWANGSADPEFYQWAIVPKDVNEPIGTISVVDRNDALGIFHIGYCIGSKWWHKGITSEAFSAVIHFLFEEVGANRIESQHDPENIHSGDVMKKCGLTFEGTLRQADFNNRGIVDACVYSILQSEWQNNTSVWQRLYNAALTVQNDRVVSPFIDAGGVAAALMTKKGNIYTGICIDTASTLGMCAERNAVANMLTNGESRIDKIVAVMPDGKVGAPCGACREYMMQLDRDSGDIEILLDLETEKTVRLKDLIPDWWGAERFGDTE

SEQ ID NO: 125 - protein, 229 aa, synthetic construct
  REGION 1..229: note = pYY-BEM4.16; tr|A0A3C1HZ18|A0A3C1HZ18_9BACI polypeptide sequence
MGDIMENWNELSEPWKRCFLQAWKAYCHGSIPIGAVLVDSEGEIFLEGRNRVHELTAPEGQLCDCRIAHAEMNVLVQVKTSDYEKLSGATIYSTMEPCIQCFGAIILSRIKNISFAAIDDKLAGATTLEDRHGFIKSRNLNIAGPFSHLGEIQIILRTDFLLRIFDSEYADPLIAAHEKDYPIGVALGRHYHRNNRLQVAKKETIPFGELFNEFSFDIKRAREGYTLGK

SEQ ID NO: 126 - protein, 205 aa, synthetic construct
  REGION 1..205: note = pYY-BEM4.17; tr|A0A1M6KV24|A0A1M6KV24_9BACT polypeptide sequence
MEASQQNILLKIEGKGPVAEINFTVTLPEWLVEQVQSGSTVFLTQKEKMRFVLELARKNVAQETGGPFAAAVFSLESGELVSAGVNVVVESRCSSAHAEVVALSLAQKAVDSHDLGAAGLPRMVLVSSAEPCAMCMGAIPWSGVKQVICGARDEDVRSVGFDEGAKPLEWVEDFAERGIEVIRDVLREEATEVLWDYRERGGEIY

SEQ ID NO: 127 - protein, 207 aa, synthetic construct
  REGION 1..207: note = pYY-BEM4.18; tr|A0A2U0T9B4|A0A2U0T9B4_9RHIZ polypeptide sequence
METAELISRLLDVIEKDIAPVTAKGVARGNKLFGAAILKKSDLAVIVAETNNEIENPLWHGEMQAIKRFFELPADQRPATRDCLFLATHEPCSLCLSGITWSGFDNFYYLFSHQDSRDGFAIPYDIQILKSVYAVPEPETGTVSPARDLYNRSNDFWTSHGLQDMIAGLARSNREALLARIDDLNALYAELSERYQRDKGGKGIPLP

SEQ ID NO: 128 - protein, 231 aa, synthetic construct
  REGION 1..231: note = pYY-BEM4.19; tr|A0A2K9PN08|A0A2K9PN08_9FLAO polypeptide sequence
MSDKKESKIKISKTSESIELDEIHSLLSYSIVQKFWENDDRNGRGYNVGVILVDENKNIVDWDINSVNKTENSTQHGEMRLISRYLDKDELYSLKGYTMYPTLEPCAMCAGMMTMTNVYRTVNGQMDYFYSKALERLSIDTRECGGYPPYPRTVISEISPSSISTRLDAEYKQYTNAGNKPIITKFLSTYKAKTIYDDAFNQFINFKCKFPENKTKYENAIKFYNSLPESI

SEQ ID NO: 129 - protein, 330 aa, synthetic construct
  REGION 1..330: note = pYY-BEM4.20; tr|F4PWM7|F4PWM7_CAVFA polypeptide sequence
MRFSLSLLFVILSVLLAGVLACKDPYNPETVDYGQCASATKANYEVRSDSKVLTPADLPADELAVHESRMRHIIDIARVNNKKFVSSIYFPNGTLACIGINTGKPNMIAHGEIVAIQNCTEIHGISMYTNYSIYTTGEPCSMCASAILWSRFKTVVWSTYNSDLYCKICMSNIPIDSSYIFSRAYGLGIEAPVAIGGVVKAEGDAWFGTYCNRPTSIYYIAPKCACQDPAKVSPLKFTQTRTTVWVEGGDKVVTQWNAIISNPSNSTIVDPPIVISPSVVFKGAPWGISAASEPNTYKLSYNKVLFPGQTFSFGYSVYGLEEVAFTALEA

SEQ ID NO: 130 - protein, 193 aa, synthetic construct
  REGION 1..193: note = pYY-BEM4.21; tr|U7QZM1|U7QZM1_PHOTE polypeptide sequence
MNKTRRKLLATLGIMSISMSFIAQAGEKKTQVINNILSKQEITEHEKYMREAIKEAIKNPKHPFGAVIVNRNNGEILSRGVNTGRNNPILHGEIQAINHYITQYGNQGWENVALYTTGEPCSMCMSALVWIGIREVIWATSISVIRNSGIRQIDISAHEIAERASSFYNPITLVGGILANETDKLFLERKRGN

SEQ ID NO: 131 - protein, 319 aa, synthetic construct
  REGION 1..319: note = pYY-BEM4.22; tr|A0A081CH48|A0A081CH48_PSEA2 polypeptide sequence
MASRRHLLATQVTGNHRKLSLWHLRGWLSPYTKLVDAVYFLTTNSFYHSLQTPPVQSITMLLSSIITSLALAAQASAYREGLHPEFQSGLSINSVPATDRDHWMRLANSAIYYPPVSHPCPQAPFGTAIVNTTSNELICAIANRVGSTGDPTQHGEITAIQHCTNVMRKKGLSPQEIIAAWKQLSLYTNAEPCTMCLSAIRWAGFKEVIYGTSVGTISENGRNQIYIPSNLVLEKSYSFGHATLMLGNILTHETDPFFQHQFNESAPCPVGCERTQVGEARVKTCEPVPNWQKLVRLEYSEDSRVGSEPVAHTPLHLEL

SEQ ID NO: 132 - protein, 203 aa, synthetic construct
  REGION 1..203: note = pYY-BEM4.23; tr|A0A3D3HMU1|A0A3D3HMU1_9GAMM polypeptide sequence
MDYSDAILGAITSIRRNSKQPGVNVTDNVTDSSTQYNNDEYWMRRALALAREAGEAGEIPVGAVLVKDNQQVAGGFNQPIRSHDPAAHAEILTLREAGAVLGNYRLIDTTLYVTLEPCMMCAGALVHSRIKRLVFGAAEPKTGAAGSFIDLLTLPRLNHYMEVTGGVLGEECSVLLSDFFRRRRAEKKALKRQNSESGSDSAS

SEQ ID NO: 133 - protein, 270 aa, synthetic construct
  REGION 1..270: note = pYY-BEM4.24; tr|A0A1N5WT13|A0A1N5WT13_9ACTN polypeptide sequence
MLEKIERRLVAAAEAVVRSPSTGDAHTVAAAAMDANGDIYSGVNVFHFTGGPCAELVVIGSAAAANAPPLITIVAVGDGDRGVIAPCGRCRQVMLDLHPDVFVIVPTGDGQLAAKPVRELLPFGYVARTGSTAPRVVYFHPRHYDTISSGLKTATVRFQDSVQTGPAVFVFDDGESIRRLDAVVEKVESRRLDHLTEEDAHHEALPDSDALRDAIKTQYPMLGDGDVVDVATFRLTAISAPDPDPRSSYPPAVSRCNPAGPRADLLVGQS

SEQ ID NO: 134 - protein, 257 aa, synthetic construct
  REGION 1..257: note = pYY-BEM4.25; tr|X0SAC5|X0SAC5_9ZZZZ polypeptide sequence
MTKDGRVIASAHDTEVTDQDSTAHAEINAIRKASKIYRKDLTGCLIISTHEPCPMCTGSIIWSNISKVVYGVSIRDSIKAGRDMINLSCKEIIKKPNAEINIYDGILKKECLKLYNNDTRKLVKKFRKYEWINIEENLLNKRMQWFENNKTMIRKLKGNDLEKAYHLILMKIGIKRSEAPIVKKSESKIIFHSKNYCPSLEACIILDLDTREVCKEIYERPTEELIRRLNSKLRFTRNYDCIRPYSDYCEEIIILEK

SEQ ID NO: 135 - protein, 154 aa, synthetic construct
  REGION 1..154: note = pYY-BEM4.26; tr|A0A3B8IC10|A0A3B8IC10_9BACT polypeptide sequence
MPSHEDFIHQCLELGKEALLQGNPPVGSVIVWQDQVIGRGIENGRSSGDITQHAELLALQEAVATGQRDKLKEAIIYSTHEPCVMCAYPIRQYKIPTVVYSVAVPELGGHTSSWHLLTTEDVPKWGKAPKIITGISAEEVEALNAAFQDSLKKG

SEQ ID NO: 136 - protein, 180 aa, synthetic construct
  REGION 1..180: note = pYY-BEM4.27; tr|A0A2N9P8B9|A0A2N9P8B9_9FLAO polypeptide sequence
MFIFKLISPPVSIEVYQDKIIQKLYICFMENIFTDEYFMKKALQEAETAFQQGEIPVGAVIVIDNRIIARSHNLTEMLNDVTAHAEMQAITASANFLGGKYLKDCTLYVTLEPCQMCAGALYWSQISKIVYGATDEQRGYRAMGAQLHPKTKVISGIMQNECTHLMKDFFKQRRSKSTKD

SEQ ID NO: 137 - protein, 178 aa, synthetic construct
  REGION 1..178: note = pYY-BEM4.28; tr|K1KX30|K1KX30_9BACT polypeptide sequence
MVKNPVNNNELYFGKHSEIPMNEEQKAYMKMAVDLSRSGMESGKGGPFGCVIVKDGKVIGIGSNSVLETNDPTAHAEIVAIRDACRNLGHFQLDGCEVYTSCEPCPMCLGAIYWARPSKVFFANDKRDAAEAGFDDDFIYQELELPYEKRKIPFEQGMQDTAKEVFQEWILKEDKTLY

SEQ ID NO: 138 - protein, 196 aa, synthetic construct
  REGION 1..196: note = pYY-BEM4.29; tr|R4XI84|R4XI84_TAPDE polypeptide sequence
MSSEIEPPSTDVHKHAVAEAADESGAADAFMQIALQQAETALLNKEVPVGCVFVHQPTGTVLATGANQTNASLNGTLHAEFVAIESILRDHPPSIFRESDLYVTVEPCVMCASALRQLQVRKVYFGCGNDRFGGCGSVFSIHSDASKTGDAAYMVESGIFRKEAIMLLRRFYLLQNESAPKPALKSTRVLKEHFDE

SEQ ID NO: 139 - protein, 212 aa, synthetic construct
  REGION 1..212: note = pYY-BEM4.30; tr|A0A239CVF7|A0A239CVF7_9DELT polypeptide sequence
MSPASKKHFPSLFSFLLLTIGLICGTAHAQPQGHTADDTAATLANASLKEHEPFIRRCYQLAIDAGKKGNHPFGALLVHKGKIVLEAENTVLTDNDFTNHAEMNLIAEAARTLSRQIIPEATVYTSCAPCAMCTATLAMAGFTRIVYGVSHDALNKRFGLKGKSVSCPALFKTMGMELEFVGPVLEKEGLRVFDFWPEKDPHAQMLKKQARK

SEQ ID NO: 140 - protein, 320 aa, synthetic construct
  REGION 1..320: note = pYY-BEM4.31; tr|A0A1Q3NME1|A0A1Q3NME1_9BACT polypeptide sequence
MTEFNYDWAKLAFSSKRPLTNLKATFIIAPREISEKRFTQLLKEYLPKGDILLGISKEDYVEGLEGQPQFAMLQQKTLQKLIDKVNDASAHKVYTLRYFQRELPAIIEKLTPPRVVGIHGSWHHSFHTLPIYYLLSEKRIPYQLVAAFSDEDEARAYEVATDKKIVRPTLEGSFDDTTVLQLTDEVAKSSYDYGFQTGAILAEKVNGVYQPVAAGFNKVVPYQTYALLNGASRETNFSPANDMNHYDTIHAEMQILVEAAKQGISLKDKTLFVNLMPCPSCARTLSQTELSEIVYRIDHSGGYAVDLLTKVGKDIRRIVY

SEQ ID NO: 141 - protein, 180 aa, synthetic construct
  REGION 1..180: note = pYY-BEM4.32; tr|A0A2G6N4N7|A0A2G6N4N7_9DELT polypeptide sequence
MKERTVSYSDRHFMAEALEMAESALTQGEFPVGCVIADGTAVVARGHRTGTTAGAVNEIDHAEINALRHLGLAGEHLDRTDLTIYSTMEPCLMCFAAIVLSGINRIVYAYEDVMGGGTGCDLTGLPPLYRDAPLTLVAGVRRRASLNLFRRFFTDPENGYWAGSLLSRYTLNQTKDSHRL

SEQ ID NO: 142 - protein, 156 aa, synthetic construct
  REGION 1..156: note = pYY-BEM4.33; tr|A0A0G0RBB8|A0A0G0RBB8_9BACT polypeptide sequence
MQSVQYNKLTHLQRRALDEAEQVLENSYNPYSHFYVGACLISEDEQLIAGTNFENAAYGSAICAERAAVLRANAMSIRRFRGIAIIARGEDFNTTEVTGPCGSCRQVLYEISQVSGCDLQVILATSKKDKIVITTIRELLPLAFGPLDLGVDIGKY

SEQ ID NO: 143 - protein, 217 aa, synthetic construct
  REGION 1..217: note = pYY-BEM4.34; tr|A0A327L2Q5|A0A327L2Q5_9RHIZ polypeptide sequence
MVTSRDGEDEAMMARCVALSRIAVGKGEYPFGAVVAREGRIVAEAINRTIRDGDVSRHAEVIALARAQKAIGRRELRECSLYSNVEPCAMCSYCIREAWVGRVVYALGSPVMGGVSKWNILRDDGLSGRMPQVFDAAPEVVSGVLVEQAQAAWRDWSPLAWEMITLRGLMTDPSARPECRTRAARPRSLWHHLVALIERPPRPYVDPTSAAEGHADL

SEQ ID NO: 144 - protein, 162 aa, synthetic construct
  REGION 1..162: note = pYY-BEM4.35; tr|S2DR30|S2DR30_9BACT polypeptide sequence
MKMKKKIEITVSLEVIQKSEWSKEDRSLIERAIHAVEHAHAPYSNFMVGTALLLDNGQIFSANNQENVSFPVGICAERAVLSYAMGNFPNNRPVKLAVVAKRRSDSTWATVTPCGLCRQTINEYEVKFGHPIEILMLNPGEEILKASGIDQLLPFRFNDLNS

SEQ ID NO: 145 - protein, 153 aa, synthetic construct
  REGION 1..153: note = pYY-BEM4.36; tr|A0A369QGF1|A0A369QGF1_9BACT polypeptide sequence
MEEHEKWMHWCLNLAQQALQQGDFPVGAVVVQKGKLIGQGVEAGQLKKDITCHAEMEAIRDARQTINTADLQNCILYSTHEPCIMCSYVIRHHKISRVVVGTTVPEVGGSSSAYPLLSAPDISIWVAPPHLVTGVLAEACQALSQAYKQKFKK

SEQ ID NO: 146 - protein, 159 aa, synthetic construct
  REGION 1..159: note = pYY-BEM4.37; tr|A0A1W6X4U4|A0A1W6X4U4_9RHIZ polypeptide sequence
MTNPSRQERWDRRFLELAKVFGTWSKDRSAGTGCVIVGPDRLLRASGYNGFARGIDDEVPERHERPAKYSWTEHAERNAIYNAAKLGISLDGCTAYVNWFPCIDCARAIVQAGIVRLVGLHPDHADQRWGSEFKFATEMLRESGIEIILYDIPELAARK

SEQ ID NO: 147 - protein, 490 aa, synthetic construct
  REGION 1..490: note = pYY-BEM4.38; tr|A0A238BW09|A0A238BW09_9BILA polypeptide sequence
MEEMARKIRTKAKKANSYCNTMTFLISKASIVLLKAECKRIELTVVIFRFLIKMNASEPNNELCDMTVIKSMLKITHVIFDLDGLLIDTEVVFSKVNQCLLSKYNKKFTPHLRGLVTGMPKKAAVTYILEHEKLSAKVDVDEYCKKYDEMAEEMLPKCSLMPGVMKLVRHLKTHSIPMAICTGATKKEFEIKTRYHKELLDLISLRVLSGDDPAVKRGKPAPDPFLVTMDRFKQKPEKAENVLVFEDAANGVCAAIAAGMNVIMVPDLTYMKIPEGLQNKINSFSDNLIISNDLNVALMSLKKELSEEEVHFLNRAFEIAVDAVLNNEVPVGCVFVFEGQEVAFGRNDVNRTKNPTYHAEMVALKMMKQWCMDNGRDLEEIMRRTTLYVTLEPCIMCASALYHLRLKKILYGAANERFGGLVSVGTREKYGAKHFIEIMPNLSVDRAVKLLKEFYEKQNPFCPEEKRKVKKPKKSGNNNDNSDDAVALNV

SEQ ID NO: 148 - protein, 159 aa, synthetic construct
  REGION 1..159: note = pYY-BEM4.39; tr|A0A1J5H6Z0|A0A1J5H6Z0_9BACT polypeptide sequence
MAYQPSEKFMQMAIDKTREGVLSGQTPFGACIVKDGKVVACEHNTVWQDTDITSHGEVHTIRAACKAIGSIDLSGCILYSTCEPCPMCFSAIHWARIDTVVYGAFIADAQDAGFNELTISNEKMKEFGGSPVNFISGFMRDENVALFKLWKEQGANNVY

SEQ ID NO: 149 - protein, 168 aa, synthetic construct
  REGION 1..168: note = pYY-BEM4.40; tr|A0A3C2D945|A0A3C2D945_9BACT polypeptide sequence
MKTTEIRIIVHEYQNIDELTENDQYLLHEARRITEFAYAPYSGFHVGAAILLGNGMIVKGNNQENSAYPSGLCAERVALFYANANYPDSEVKTIAISAAKNGILVNDPIKPCGGCRQTLSEAEVRFGSPIRIILDGQDSILVLHGVESLLPLSFSKKDLASPLAATGR

SEQ ID NO: 150 - protein, 214 aa, synthetic construct
  REGION 1..214: note = pYY-BEM4.41; tr|A0A1I7EYS3|A0A1I7EYS3_9BURK polypeptide sequence
MKFKLDPSRPPDEDDYYLGVALAVRRKANCTGNRVAAVIVKNKRVIATGYNGVPEDMPNCLDGGCLRCSNPGGQFKSGTRYDLCICVHAEQNALLTAARFGISVEGAHLYTTMQPCFGCAKEILQAKIEKVFYLHPWVPTDVDPVMDAAMKAEYAKIIGKLKVKKLDFDDPVATWAVTTMRQAALASDKNPDKKTPPKTAKKKVAKKKSRTSPR

SEQ ID NO: 151 - protein, 155 aa, synthetic construct
  REGION 1..155: note = pYY-BEM4.42; tr|H8GQX8|H8GQX8_METAL polypeptide sequence
MNHEHFMRRAIELARQAPQYPFGAVIVRRDDGQCVGQGFNRSDLNPTYHGEMVAINDCAVRHCAEDWRGFDLYTTAEPCAMCQGAIEWAGIGRVFYGTSIPYLQKLGWWQIDLRAAEVSARAVFRDTLIVGGILETECNALFAAARRGCFGTGSE

SEQ ID NO: 152 - protein, 156 aa, synthetic construct
  REGION 1..156: note = pYY-BEM4.43; tr|A0A0S8HZN3|A0A0S8HZN3_9CHLR polypeptide sequence
MDEHDIRFLRASFDVARNARKNGNHPFGALLVDEHGRIVMEAENTVITAKDCTGHAETNLMREASSKYDSDFLANCTIYTSTEPCPMCAGAIFWSNVRRVVYGLSEESLYEIAGRGSEEVLFLSCREIFERGKKLIEVIGPLLEDEAREVHMGFWR

SEQ ID NO: 153 - protein, 193 aa, synthetic construct
  REGION 1..193: note = pYY-BEM4.44; tr|E3SF31|E3SF31_9CAUD polypeptide sequence
MKPTTVLQIAYLVSQESKCCSWKVGAVIEKNGRIISTGYNGSPAGGVNCCEHAEEQGWLLNKPKPVLIPGHKSECVRFSQVDRFVLAKAHREAHSAWSKNNEIHAELNAILFAARMGSSIEGATMYVTLSPCPDCAKAISQSGIKKLVYCETYDKNIPGWDDILKNAGIEVFNVPKRSLDKLNWENINEFCGE

SEQ ID NO: 154 - protein, 330 aa, synthetic construct
  REGION 1..330: note = pYY-BEM4.45; tr|F8AAC6|F8AAC6_THEID polypeptide sequence
MIRAPWHEYFMLLAKIVALRSGCNSRPSGAVIVKNKRILATGYNGPMPGAWHCTDRGPGYCFRREKGIPDIDKYNFCRATHAEANAIAQAARFGISVEGASLYCTLAPCYVCLKLIASAGIKKVYYEHDYGSRDFERDQFWKEAIKEAGLEKFEQITVSQEVMEQLQEILPYPTSKRRLAPTEFLDEFEDGKKYGVPSIEVLFNKLNYLTRQALKDITFVIEKTTVTEEPEGISFYLSGKMVELSELINTVKKQINADQNFYFLAKHNAIEAKIEILREAENIRLKAFLNECPLESFKRIAESLDYILYQVSNSLSLPTRLELSVNLLRI

SEQ ID NO: 155 - protein, 158 aa, synthetic construct
  REGION 1..158: note = pYY-BEM4.46; tr|A0A2H4ZNK4|A0A2H4ZNK4_9EUKA polypeptide sequence
MKKQLSRKIQEEWMSRLLRNAYDAGTYGEVPIAAVILNESGQCIGWGRNCREKDQNPLGHAEIIALRQASYLKKSWRFNECTMLVTLEPCPMCAGALLQARINHIIYGASDYKRGGFGGVLDLSKNSSAHHKIEITRGVKSIQSCQLLETWFRRRRRV

SEQ ID NO: 156 - protein, 176 aa, synthetic construct
  REGION 1..176: note = pYY-BEM4.47; tr|A0A239N5N1|A0A239N5N1_9PSED polypeptide sequence
MEGRAGIIPFDEGGAAMGPAEEDSPMQHLAYMREALALARANVEAGGRPFGAVLVRDGEVIARAANGTHLDHDPTAHAELLALRAAGRALGSPRLDGCVVYASGHPCPMCLAAMHLSGVSAAYYAYSNADGEPYGLSTAAVYAQMAQPVEWQSLPLQALRPEDEEGLYGFWRERRP

SEQ ID NO: 157 - protein, 199 aa, synthetic construct
  REGION 1..199: note = pYY-BEM4.48; tr|A0A328VTR2|A0A328VTR2_9PSED polypeptide sequence
MHPEHLALLQQAPASTHADDTWARLCCEQALLAVEEGCYAVGALLVDGAGELLCSGRNQVFAPAYASAAHAEMRVLDQLEAEHAQVDRRSLTLYVSLEPCLMCYGRILLAGITRVRYLARDRDGGFALRHGRLPPAWANLASGLSVVQAKADPYWLDLAEHAIGRLQDRQTLRQRVIRAWRGQRTLTDEFSSTKRTHSG

SEQ ID NO: 158 - protein, 402 aa, synthetic construct
  REGION 1..402: note = pYY-BEM4.49; tr|A0A103YG48|A0A103YG48_CYNCS polypeptide sequence
YIRELHASSLRRDEHEIQNPKILVIVDRLSSPSLHVSLSLSLSLVIFPPFIPLNQTPTHMENAKVVEAKDGTIAVASAFSGHQEVVQDRDHKFLTRAVEEAYKGVECGDGGPFGAVVVHKDEVVASCHNMVLKHTDPTAHAEVTAIREACKKLNKIELSDCEIYASCEPCPMCFGAIHLSRIKRLIYGAKAEAAIAIGFDDFIADALRGTGFYQKAHLEIKQADGNGAMIAEQVFEKTKAKFAIDHKFLTRAVEEAYKGVECGDGRPFGALVVHKDEVVVSCHNMVLNYTDPTAHAEITAIREACKKLNRIELSDCEMYSSCEPCPMCFGAIQISRIKRLVYGAKAEASIASGIPIGDFISDALKGTGFHEKANFEIKQADGNGAMIAEQVFERTKAMFPKR

SEQ ID NO: 159 - protein, 195 aa, synthetic construct
  REGION 1..195: note = pYY-BEM4.50; tr|W5M1M8|W5M1M8_LEPOC polypeptide sequence
NSSTRESRVMAQMEINGGASPPKKPGKGQSAADQDMITGLINKALQAKEFAYCPYSNFRVGAALMTNDGRVFTGCNVENACYNLGVCAERTAILKAVSEGYESFRAIAVSSDLQDQFISPCGACRQVMREFGTGWDVFLTKVDGSYVRMTVDELLPMSFGPDDLKKKKVFSLQNGHEVSTQFYTHSPCEAGENNN

SEQ ID NO: 160 - protein, 134 aa, synthetic construct
  REGION 1..134: note = pYY-BEM4.51; tr|A0A3N5YPZ2|A0A3N5YPZ2_9ALTE polypeptide sequence
MSNSETEHIQALVDAAQAAQKQSYSPYSSFQVGAAIFADDGNTYSGCNIENVAYPLGQCAEATAIGMMIMQGAKRIEDIMIASPNDQVCPPCGGCRQKISEFGTAETKIHMVTRSGEVSTVTLGELLPLAFDSL

SEQ ID NO: 161 - protein, 162 aa, synthetic construct
  REGION 1..162: note = pYY-BEM4.52; tr|A0A2A9NC86|A0A2A9NC86_9AGAR polypeptide sequence
MTNSTLSNEDRTRLIQGAFQARKKTYSPYSNFPVGAALLTTDGRIIEGANIENASYGGTICAERTAIVKAVSDGYRHFAGIAVTTKMPTRVSPCGICRQVLREFCSLDMPVLLVPGDYPQRNPVDDDGADKPGVITEGGVRETTLGALLPDSFGPENLPPRA

SEQ ID NO: 162 - protein, 163 aa, synthetic construct
  REGION 1..163: note = pYY-BEM4.53; tr|A0A2D6RD43|A0A2D6RD43_9GAMM polypeptide sequence
MNIENLITENDETLIRRCIELAGESVKNGDKPFGALLAKDGNIIFESSNNAKTKVPYHAEILTLMDAQDKLNTTDLSDYALYSNCEPCPMCSFMIREYKLDKVVFSVHSPYMGGQSRWNILEDDVLTRFKPYFSKPPNVVGGVLESEGKRIFDKVGLWMFGKE

SEQ ID NO: 163 - protein, 204 aa, synthetic construct
  REGION 1..204: note = pYY-BEM4.54; tr|A0A0H3AVL6|A0A0H3AVL6_BRUO2 polypeptide sequence
MHAKGYSQQERRIIPFANRFRFRELCSNKSLHGLRAKFPEQYTKWDPMRKAASITKANSATPMDIALEEAHAAGERGEVPIGAVIVRDGEIIARAGNRTREFNDVTAHAEILTIRQAGEMLGSERLIDCDLYVTLEPCAMCAAAISFARIRRLYYGASDPKGGGIEHGGRFYTQPTCHHAPEIYPGFCEADARKILKDFFREKR

SEQ ID NO: 164 - protein, 165 aa, synthetic construct
  REGION 1..165: note = pYY-BEM4.55; tr|A0A242H531|A0A242H531_9ENTE polypeptide sequence
MFIVKNNIEVIQQQAELDAKFMKQALKLAKDASNNGNEPFGAVLVKNDKVILTGENQIHTESDPTYHAELGIIRDFCTSQKITDLSEYTLYTSCEPCCMCAGAMVWSNLDRMVYGLGHDELAEIAGFNIMIGSEEIFSKSPNRPEVAKGVLKEAAVPVYVDYFQR

SEQ ID NO: 165 - protein, 181 aa, synthetic construct
  REGION 1..181: note = pYY-BEM4.56; tr|A0A2R6XZE2|A0A2R6XZE2_9BACL polypeptide sequence
MSGRISWHEYFMAQAKLIALRATCTRLMVGAVIVRDRRVIAGGYNGSIAGDEHCIDVGCKVRDGHCIRTIHAEQNALMQCAKFGVSTDGAELYVTHFPCLNCTKLLIQAGIRHIYYEVPYRVDPYAIELLEKAGVGTTQITVDLNAYVQVMSKVSTDPALTYVPESKAQKDEYGQSVGKIV

SEQ ID NO: 166 - protein, 173 aa, synthetic construct
  REGION 1..173: note = pYY-BEM4.57; tr|A0A139SHT6|A0A139SHT6_9BACT polypeptide sequence
MSEANASSESLPSRNSPVELIAEAAGKFGRRPTWDEYFMATAVLISTRSSCERLNVGCVIVTAGESHKNRIVAAGYNGHLPGSPHTSRMRDGHEQATVHAEQNAISDAARRGSSVEGCTAYVTHYPCINCAKILASAGIAKICYRLDYHNDPLVKPMLAEAGIEIVQLGEAAS

SEQ ID NO: 167 - protein, 170 aa, synthetic construct
  REGION 1..170: note = pYY-BEM4.58; tr|A0A261DBH2|A0A261DBH2_9RICK polypeptide sequence
MVMKKKLITVKRSTEFNNFFMEEALKQAQFALDKNEIPVGAIIVNRITNKVIAKAHNIVEQTKNPVLHAEIVAINQSCQILSSKNLSDCDMYVTLEPCVMCSGAISFARIGRLFYAANDPKQGAIENGGRFFNSKSCFYRPEIYSGFSAKISENLIKEFFYNVRYQKCNP

SEQ ID NO: 168 - protein, 146 aa, synthetic construct
  REGION 1..146: note = pYY-BEM4.59; tr|A0A2N0XZK6|A0A2N0XZK6_9VIBR polypeptide sequence
MTDNSLHESYMRQAFELSKSALPGCRPNPPVGCVFVKDGEVVSSGFSQPPGNHHAEAGAIAAYTGSYDGLVAYVTLEPCSFQGRTPSCAKALVRVRPEKVYVAILDPDTRNSGAGIKILEDAGIDVEVGLLGEEVASFLNPYLIRN

SEQ ID NO: 169 - protein, 159 aa, synthetic construct
  REGION 1..159: note = pYY-BEM4.60; tr|A0A1V5R0F9|A0A1V5R0F9_9BACT polypeptide sequence
MTKKETTKLHALDDFCMKKALLLAKRAFRADEVPVGALVVDSSNKVIGRGYNQVEKRKSQRAHAEQLAIEQACKKIGDWRLEGCTLYVTLEPCTMCMGLIKLSRIERVVFGAASPLFGYQLDKNRKSQLYKKGVIKIRKGVGKATAAALLKDFFKNKRM

SEQ ID NO: 170 - protein, 167 aa, synthetic construct
  REGION 1..167: note = pYY-BEM4.61; tr|A0A2W0H8Y3|A0A2W0H8Y3_9BACI polypeptide sequence
MKNNGRLDHEYFMTEALQEAKEAGQRGDLPIGAVIVHNGRIIARGSNMRKTAGIKISHAENNAMHNCAPYLMKHASECVIYTTLEPCIMCLTTLVMANIDSIVFAADDKYMNMKPFIDANSYIRDRIHQYKGGVCRGESEALLRKYSPYAAELALNGTHPHHRKGGA

SEQ ID NO: 171 - protein, 165 aa, synthetic construct
  REGION 1..165: note = pYY-BEM4.62; tr|A0A261BDB7|A0A261BDB7_CAERE polypeptide sequence
LYKLYIFRMTTTKANLTQFEQELVDKAVGAMEKAYCKYSGFKVGAALVCEDGEIIIGANHENASYGATICAERSAMVTALTKGHRKFKLLAVATELEAPCSPCGICRQYLIEFGDYKVILGSSTSDQIIETTTYGLLPYAFTPKSLDDHEKEAEERNHQEGEKKH

SEQ ID NO: 172 - protein, 162 aa, synthetic construct
  REGION 1..162: note = pYY-BEM4.63; tr|A0A2E1PHI6|A0A2E1PHI6_9GAMM polypeptide sequence
MKELLIHSWLMLNSNSKLIMERVIELSEINLKNGKIPIAAVIVDKKNYEIISESQNEDSPIGHAELLAITKALKKLNTNRLDSTNLFVTIEPCPMCAYAISKCHINRLYFGSEDEKGGGVINGPRIFESHNLKKIDYVSHCYHEKTTQLMQSFFQLKRNQQL

SEQ ID NO: 173 - protein, 133 aa, synthetic construct
  REGION 1..133: note = pYY-BEM4.64; tr|A0A378LUA7|A0A378LUA7_9GAMM polypeptide sequence
MDTIIKKMISNAHNTLAHSYSPYSKFSVASCICTDKDNFYTGVNVENSAYGLAICAETSAISAMVTAGEKRIKSMVVMAGTNILCSPCGACRQRIYEFSTPDTLIHLCDKNSILRTFKINELLPEAFKFDFNP

SEQ ID NO: 174 - protein, 370 aa, synthetic construct
  REGION 1..370: note = pYY-BEM4.65; tr|A0A139HQ78|A0A139HQ78_9PEZI polypeptide sequence
MADSLKSKPGHARHDTALIHGLSQSDVQKLSESCVDAKSKAYCPYSHFRVGCAVLLANGDVVQGANVENAAYPVGTCAERVALGTAVGAKKGDFRALAVSTDISPPASPCGMCRQFIREFCELNTPILMYDKDGKSVVMTLEQLLPMSFGPDKLLPPGQLENGLMQTQTQSSFVTRAFSTTSSRRQDDTPQVPQSHYDFFPQTFPQGPPPKTSFSPDLKQLRKEFLQLQAKAHPDLAPQDQKRRAEALSMRINEAYKTLQSPLRRAQYLLSQQGIDVEDETAKLDDSSLLMEVMEAREAVEEVEDEEQLNEIRAENNGRIEESVRVLEDAFRDNEFEKAAQEAIRLRYWVNIEESIQGWEKGNGGGILHH

SEQ ID NO: 175 - protein, 165 aa, synthetic construct
  REGION 1..165: note = pYY-BEM4.66; tr|A0A2A9FXV0|A0A2A9FXV0_9VIBR polypeptide sequence
MCNLKENKDMDKYFHFACDATIEGMREGTGGPFGATLTRNGEVVCSVANTVLKDMDISGHAEMVAVREACKKLDTLDLSDCVMYATCEPCPMCVSVMLWAGIKTCYYASTHLDAAKHGFSDQQLRDYLDGSDTSTLNMVHIEDNRDDCAKIWTEFRHLNETKNDG

SEQ ID NO: 176 - protein, 509 aa, synthetic construct
  REGION 1..509: note = pYY-BEM4.67; tr|A0A1A8AG96|A0A1A8AG96_NOTFU polypeptide sequence
MEHSDRWSRAEPGLSTSSRETRDGSTQTDCKLQGHGPRLSKVNLFTLLSLWMELFPQEQDEENGQSQIRRSGLVVVREGKVVGLHCSGADLHAGQAAILQHGASLANCQLFFSRRPCATCLKMIINAGVRQITFWPGDPEISMLTSNQTHSQRTSQSITEASLDATAVEKLKSNSRPQICVLMQPLAPGVLQFVDETSRRSDFMERMMDDDPELDSEKLFNSDRLRHLKDFCRHFLIQTDQRHKDILSQMGLKNFCVEPYFSNLRSNMTELVEVLAAVAAGMPQQHYGFYREESLSLDPHPVDVSQAVARHCIVQARLLSYRTEDPKVGVGAVIWAKGQSACCCGTGRLYLIGCGYNAYPAGSKYAEYPQMDNKQEDRERRKYRYIVHAEQNALTFRTRDIKPDECSMLFVTKCPCDECIPLIRGAGVKHIYTSDQDRDKDKGDISYLRFGSLKGVCKFIWQRSPPVSSASSLHLTNGCVGKHVRQAEQQIYKNKKLCTKGSSGSSDIC

SEQ ID NO: 177 - protein, 148 aa, synthetic construct
  REGION 1..148: note = pYY-BEM4.68; tr|A0A3E2VN88|A0A3E2VN88_9FIRM polypeptide sequence
MEKEITNMDKQKLIQMAVDGLGRSYAPYSHFHVSAALLCADGTVYTGNNIENAAYTPSVCAERCAIFKAVGDGRREFEAIAVCGGPDGVIEDYCPPCGVCRQVMREFCDPSSFRVLVAKTAEDYREYTLEQLLPDGFGPDHLTGSGER

SEQ ID NO: 178 - protein, 221 aa, synthetic construct
  REGION 1..221: note = pYY-BEM4.69; tr|A0A2D5ZRJ2|A0A2D5ZRJ2_9BACT polypeptide sequence
MARPVHLHTGERRTEEGATESRAVAAVATAITRAPRAPPRPATGRERDGPPPRRVFGGGLRVGDPSGYDRGESKPIGGPLTEKRSDWHSYFMRIAGEVATRATCDRKHVGAVIVRNRTILSTGYNGSIRGMPHCDDVGHDMVDGHCIATIHAEANAILQAARNGVMIQDGSIYITASPCWNCFKLVANAGLKRVYYGEFYRDKRSFEVARRLGIDLMHIEV

SEQ ID NO: 179 - protein, 155 aa, synthetic construct
  REGION 1..155: note = pYY-BEM4.70; tr|A0A1B8WPS3|A0A1B8WPS3_9BACI polypeptide sequence
MEGVQLIYQFQWGNLIMTVNKEDLYLIDVARNTIKTLYVDGKHHVGAAVRTKTGKIYSAVHLEANIGRVSVCAEAIALGKAISEGESEFDTIVAVRHPDPTQENQKIEVVSPCGICRELISDYGKGTNVILKNKEGYIKTVISDLLPNKYIREDN

SEQ ID NO: 180 - protein, 156 aa, synthetic construct
  REGION 1..156: note = pYY-BEM4.71; tr|A0A1W5ZQK9|A0A1W5ZQK9_9BACI polypeptide sequence
MNRFMERAVSLAAENVRVGGQPFGAVLVKDDELVAEGVNEMHLNYDVSGHAELLAIRRAQGELQTHDLSGYTMYASGEPCPMCLSAMYFAGIKDVFYCATVEEAAQVGLEKSKNVYDDLQKSKGERSLVMKQMPLEDDQEDPMKLWDERTNHNGTS

SEQ ID NO: 181 - protein, 340 aa, synthetic construct
  REGION 1..340: note = pYY-BEM4.72; tr|A0A378V0W4|A0A378V0W4_MYCFO polypeptide sequence
MVHAQFDPTARQALAATAVEAKTRKDLTWQQIADAAELSPAFVTAAVLGQHALPARSAEAVAALLGLDDDAALLLQTIPIRGSIPGGIPTDPTIYRFYEMLQVYGTTLKALVHEQFGDGIISAINFKLDVRKVADPEGGERAVITLDGKYLPPNPFDRVRYRGGLMDFAQRTIDIARQNVAEGGRPFATVIVKNGEILAESPNLVAQTHDPTAHAEILAIRKACTRIGTEHLIGATIYVLAQPCPMCLGSLYYCSPDEVVFLTTRDAYEPHYVDDRKYFELNMFYDEFAKPWDQRRLPMRYEPRDAAVDVYKLWQERNGGERRVPGAPTSTRPGKNPRGE

SEQ ID NO: 182 - protein, 157 aa, synthetic construct
  REGION 1..157: note = pYY-BEM4.73; tr|I3XF03|I3XF03_RHIFR polypeptide sequence
MKQRCMSPKSAQRFWDNDMHNNKDRPMSENELFVAAREAMAKAHAPYSKFPVGAAIRAEDGQIYTGANIENLSFPEGWCAETTAISHMVMAGQRKIMEVAVIAEKLALCPPCGGCRQRLAEFSGASTRIYLCDETGIKKSLALSDLLPHSFETEILG

SEQ ID NO: 183 - protein, 595 aa, synthetic construct
  REGION 1..595: note = pYY-BEM4.74; tr|F8IEF3|F8IEF3_ALIAT polypeptide sequence
MDAKELETRGWLCMRAVDVIDKKRRGEALAEEELRFLIEGYVAGRIPDYQMSAFLMAVVWRGMTREETLVLTRLLADSGERLDLSGIPGVKVDKHSTGGVGDKATLVVLPLVASIGVPVIKMSGRGLGHTGGTIDKLESIPGFRTDLSVAELVAQVRQVGIALGGQTADLAPADKKLYALRDVTGTVESLPLIASSVMSKKLAGGADAIVLDVKVGDGAFMKSRSDARRLARLMVEIGEAAGRRTVAVLSNMDQPLGCAIGNALEVAEAIRVLSGEGPFDLAEIALALAEEMTVLAGVAATREEARRMLRQSVAEGRALETLRRWIAAQGGDPAVVDDPSRLPQAPVQMPYLPKKAGFVAKLSALAFGLAAMRLGAGRETKEEAIDPSVGIVLHAKVGDRVQTHRPMFTVHARTGEDALRCIQELEAAIQISDDPVEAPPLILARIDRSEALPYADLMDAAREARDRAYVPYSGFAVGAALELADGRMVTGANVENASYGLTNCAERSAVFRAVAEGGPGTKPEIRAVAVIADSPEPVSPCGACRQVLAEFCSPDTPVYLGNLQGDVRETTVGALLPGAFTDAQMANVRRQDKEA

SEQ ID NO: 184 - protein, 153 aa, synthetic construct
  REGION 1..153: note = pYY-BEM4.75; tr|A0A1G3M638|A0A1G3M638_9SPIR polypeptide sequence
MKTTNINALDKWDLRFLQMAEHVAEWSKDPSTKVGAVIVRPDRTIASVGFNGFARGVRDTVERLWNRELKYPLTVHAELNAILSAHEPVRGHSLYVSPLSPCSNCAGVIIQSGIARVVAKCGQVNNPAQWSESFNLALTAFAEAGVSVILVEH

SEQ ID NO: 185 - protein, 177 aa, synthetic construct
  REGION 1..177: note = pYY-BEM4.76; tr|A0A3D9LFR2|A0A3D9LFR2_9MICC polypeptide sequence
MEQNDHGSSGAFSDPFEDDIPLTASLPRITGTGSGIDWQRLESTARAAMTRAYVPYSRFPVGAAALVEDGRVVAGCNIENASLGLTLCAECSLVSNLQMSGGGRIVAFYCVDGNGEVLMPCGRCRQLLYEFHAPGMRLMGPDGELTMDEVLPLAFGPADMTHLSDSAASTDDPGRTR

SEQ ID NO: 186 - protein, 172 aa, synthetic construct
  REGION 1..172: note = pYY-BEM4.77; tr|A0A3B9YGB5|A0A3B9YGB5_9BACT polypeptide sequence
MAKPISKKYRKLIETAKAARKKAYSPYSRYQVGAAVLTESGRIYSGANMENASYGLCMCAERVAIANAVTRGEKVLQAVCVVGKKARPCGACRQVMLEFSTKETELLMVDIDPNARRDTVIRTRVYSMLPNPFDPFESGMLPQHPQNLLRRRKSPQPRRKRRSRPVHREVSR

SEQ ID NO: 187 - protein, 391 aa, synthetic construct
  REGION 1..391: note = pYY-BEM4.78; tr|A0A182F569|A0A182F569_ANOAL polypeptide sequence
MPRPSQFRVSSSQSLSNSQIQASQSSDSVVDITSYVNAVVKALLNLSCTKTIIKRADLVNIALKGNGRLIGRVLQDANIELKEIYGYELIEVEKSKTMILCSTLAAGSMDELNDANRRRYTFLYLILGYIFMKNGSVPETIVWEFLETLGIEEQQEHNYFGDVRKLYDSLFKQAYLTRTKQALEGLNDDVMLISWGVRSKHEVSKKDILAGFCKVMNRDPVDFKAQYIEANEKDDKMNNNINGTVDGRNTVEYSSLDASVKELIEAAIKVRNNAYCPYSNFAVGAALRTVGGDIVTGCNVENGTFGPSVCAERTAVCKAVSEGHREFTAVAVVAFQETEFTAPCGTCRQTLSEFSRKDIPIYLVKPSPVRVMVTSLFQLLPHAFSPSFLNK

SEQ ID NO: 188 - protein, 151 aa, synthetic construct
  REGION 1..151: note = pYY-BEM4.79; tr|A0A264Z0D4|A0A264Z0D4_9BACI polypeptide sequence
MEPKKLIEEAIVASKQAYVQYSNFHVGAALLTKDGKLYHGCNIENASYGLTNCAERTAIFKAVSEGEKEFQAIAVVGDTEGPISPCGACRQVLAEFFSPDTVVILANLKGDHVVTNINELLPGFFSSKDLQKKVKNCFEKNALGSSCLRPI

SEQ ID NO: 189 - protein, 229 aa, synthetic construct
  REGION 1..229: note = pYY-BEM4.80; tr|A0A1L9Q1R3|A0A1L9Q1R3_ASPVE polypeptide sequence
MPLSAEEAALVETATATINSIPLSEDYSVASAAKASDGRVFTGVNVYHFTGGPCAELVVLGVAAAAGAAQLTHIVAVANEQRGILSPCGRCRQVLLDLQPNIQVIVGKEGSEQSVPVAQLLPFSYRQPDQHTPVIFKALTSSGPVVVDFFATWCGPCKAVAPVVGKLSETYTDVRFIQVDVDKARSISQEHDIRAMPTFVLYKDGKLLDKRVVGGNMKELEEQIKAIIA

SEQ ID NO: 190 - protein, 18 aa, synthetic construct
  REGION 1..18: note = synthetic peptide
KRTADGSEFESPKKKRKV

SEQ ID NO: 191 - protein, 16 aa, synthetic construct
  REGION 1..16: note = synthetic peptide
KRPAATKKAGQAKKKK

SEQ ID NO: 192 - protein, 17 aa, synthetic construct
  REGION 1..17: note = synthetic peptide
KKTELQTTNAENKTKKL

SEQ ID NO: 193 - protein, 19 aa, synthetic construct
  REGION 1..19: note = synthetic peptide
KRGINDRNFWRGENGRKTR

SEQ ID NO: 194 - protein, 16 aa, synthetic construct
  REGION 1..16: note = synthetic peptide
RKSGKIAAIVVKRPRK

SEQ ID NO: 195 - protein, 7 aa, synthetic construct
  REGION 1..7: note = synthetic peptide
PKKKRKV

SEQ ID NO: 196 - protein, 30 aa, synthetic construct
  REGION 1..30: note = synthetic polypeptide
MDSLLMNRRKFLYQFKNVRWAKGRRETYLC

SEQ ID NO: 197 - protein, 1368 aa, Streptococcus pyogenes [sequence omitted]

SEQ ID NO: 198 - DNA, 4104 bp, Streptococcus pyogenes
  misc_feature 1..4104: note = wild type spCas9 polynucleotide sequence
  source 1..4104: mol_type = genomic DNA
atggataagaaatactcaataggcttagatatcggcacaaatagcgtcggatgggcggtgatcactgatgattataaggttccgtctaaaaagttcaaggttctgggaaatacagaccgccacagtatcaaaaaaaatcttataggggctcttttatttggcagtggagagacagcggaagcgactcgtctcaaacggacagctcgtagaaggtatacacgtcggaagaatcgtatttgttatctacaggagattttttcaaatgagatggcgaaagtagatgatagtttctttcatcgacttgaagagtcttttttggtggaagaagacaagaagcatgaacgtcatcctatttttggaaatatagtagatgaagttgcttatcatgagaaatatccaactatctatcatctgcgaaaaaaattggcagattctactgataaagcggatttgcgcttaatctatttggccttagcgcatatgattaagtttcgtggtcattttttgattgagggagatttaaatcctgataatagtgatgtggacaaactatttatccagttggtacaaatctacaatcaattatttgaagaaaaccctattaacgcaagtagagtagatgctaaagcgattctttctgcacgattgagtaaatcaagacgattagaaaatctcattgctcagctccccggtgagaagagaaatggcttgtttgggaatctcattgctttgtcattgggattgacccctaattttaaatcaaattttgatttggcagaagatgctaaattacagctttcaaaagatacttacgatgatgatttagataatttattggcgcaaattggagatcaatatgctgatttgtttttggcagctaagaatttatcagatgctattttactttcagatatcctaagagtaaatagtgaaataactaaggctcccctatcagcttcaatgattaagcgctacgatgaacatcatcaagacttgactcttttaaaagctttagttcgacaacaacttccagaaaagtataaagaaatcttttttgatcaatcaaaaaacggatatgcaggttatattgatgggggagctagccaagaagaattttataaatttatcaaaccaattttagaaaaaatggatggtactgaggaattattggtgaaactaaatcgtgaagatttgctgcgcaagcaacggacctttgacaacggctctattccccatcaaattcacttgggtgagctgcatgctattttgagaagacaagaagacttttatccatttttaaaagacaatcgtgagaagattgaaaaaatcttgacttttcgaattccttattatgttggtccattggcgcgtggcaatagtcgttttgcatggatgactcggaagtctgaagaaacaattaccccatggaattttgaagaagttgtcgataaaggtgcttcagctcaatcatttattgaacgcatgacaaactttgataaaaatcttccaaatgaaaaagtactaccaaaacatagtttgctttatgagtattttacggtttataacgaattgacaaaggtcaaatatgttactgagggaatgcgaaaaccagcatttctttcaggtgaacagaagaaagccattgttgatttactcttcaaaacaaatcgaaaagtaaccgttaagcaattaaaagaagattatttcaaaaaaatagaatgttttgatagtgttgaaatttcaggagttgaagatagatttaatgcttcattaggcgcctaccatgatttgctaaaaattattaaagataaagattttttggataatgaagaaaatgaagatatcttagaggatattgttttaacattgaccttatttgaagatagggggatgattgaggaaagacttaaaacatatgctcacctctttgatgataaggtgatgaaacagcttaaacgtcgccgttatactggttggggacgtttgtctcgaaaattgattaatggtattagggataagcaatctggcaaaacaatattagattttttgaaatcagatggttttgccaatcgcaattttatgcagctgatccatgatgatagtttgacatttaaagaagatattcaaaaagcacaggtgtctggacaaggccatagtttacatgaacagattgctaacttagctggcagtcctgctattaaaaaaggtattttacagactgtaaaaattgttgatgaactggtcaaagtaatggggcataagccagaaaatatcgttattgaaatggcacgtgaaaatcagacaactcaaaagggccagaaaaattcgcgagagcgtatgaaacgaatcgaagaaggtatcaaagaattaggaagtcagattcttaaagagcatcctgttgaaaatactcaattgcaaaatgaaaagctctatctctattatctacaaaatggaagagacatgtatgtggaccaagaattagatattaatcgtttaagtgattatgatgtcgatcacattgttccacaaagtttcattaaagacgattcaatagacaataaggtactaacgcgttctgataaaaatcgtggtaaatcggataacgttccaagtgaagaagtagtcaaaaagatgaaaaactattggagacaacttctaaacgccaagttaatcactcaacgtaagtttgataatttaacgaaagctgaacgtggaggtttgagtgaacttgataaagctggttttatcaaacgccaattggttgaaactcgccaaatcactaagcatgtggcacaaattttggatagtcgcatgaatactaaatacgatgaaaatgataaacttattcgagaggttaaagtgattaccttaaaatctaaattagtttctgacttccgaaaagatttccaattctataaagtacgtgagattaacaattaccatcatgcccatgatgcgtatctaaatgccgtcgttggaactgctttgattaagaaatatccaaaacttgaatcggagtttgtctatggtgattataaagtttatgatgttcgtaaaatgattgctaagtctgagcaagaaataggcaaagcaaccgcaaaatatttcttttactctaatatcatgaacttcttcaaaacagaaattacacttgcaaatggagagattcgcaaacgccctctaatcgaaactaatggggaaactggagaaattgtctgggataaagggcgagattttgccacagtgcgcaaagtattgtccatgccccaagtcaatattgtcaagaaaacagaagtacagacaggcggattctccaaggagtcaattttaccaaaaagaaattcggacaagcttattgctcgtaaaaaagactgggatccaaaaaaatatggtggttttgatagtccaacggtagcttattcagtcctagtggttgctaaggtggaaaaagggaaatcgaagaagttaaaatccgttaaagagttactagggatcacaattatggaaagaagttcctttgaaaaaaatccgattgactttttagaagctaaaggatataaggaagttaaaaaagacttaatcattaaactacctaaatatagtctttttgagttagaaaacggtcgtaaacggatgctggctagtgccggagaattacaaaaaggaaatgagctggctctgccaagcaaatatgtgaattttttatatttagctagtcattatgaaaagttgaagggtagtccagaagataacgaacaaaaacaattgtttgtggagcagcataagcattatttagatgagattattgagcaaatcagtgaattttctaagcgtgttattttagcagatgccaatttagataaagttcttagtgcatataacaaacatagagacaaaccaatacgtgaacaagcagaaaatattattcatttatttacgttgacgaatcttggagctcccgctgcttttaaatattttgatacaacaattgatcgtaaacgatatacgtctacaaaagaagttttagatgccactcttatccatcaatccatcactggtctttatgaaacacgcattgatttgagtcagctaggaggtgactga

SEQ ID NO: 199 - protein, 1367 aa, Streptococcus pyogenes
  REGION 1..1367: note = MISC_FEATURE - spCas9 polypeptide sequence
MDKKYSIGLDIGTNSVGWAVITDDYKVPSKKFKVLGNTDRHSIKKNLIGALLFGSGETAEATRLKRTARRRYTRRKNRICYLQEIFSNEMAKVDDSFFHRLEESFLVEEDKKHERHPIFGNIVDEVAYHEKYPTIYHLRKKLADSTDKADLRLIYLALAHMIKFRGHFLIEGDLNPDNSDVDKLFIQLVQIYNQLFEENPINASRVDAKAILSARLSKSRRLENLIAQLPGEKRNGLFGNLIALSLGLTPNFKSNFDLAEDAKLQLSKDTYDDDLDNLLAQIGDQYADLFLAAKNLSDAILLSDILRVNSEITKAPLSASMIKRYDEHHQDLTLLKALVRQQLPEKYKEIFFDQSKNGYAGYIDGGASQEEFYKFIKPILEKMDGTEELLVKLNREDLLRKQRTFDNGSIPHQIHLGELHAILRRQEDFYPFLKDNREKIEKILTFRIPYYVGPLARGNSRFAWMTRKSEETITPWNFEEVVDKGASAQSFIERMTNFDKNLPNEKVLPKHSLLYEYFTVYNELTKVKYVTEGMRKPAFLSGEQKKAIVDLLFKTNRKVTVKQLKEDYFKKIECFDSVEISGVEDRFNASLGAYHDLLKIIKDKDFLDNEENEDILEDIVLTLTLFEDRGMIEERLKTYAHLFDDKVMKQLKRRRYTGWGRLSRKLINGIRDKQSGKTILDFLKSDGFANRNFMQLIHDDSLTFKEDIQKAQVSGQGHSLHEQIANLAGSPAIKKGILQTVKIVDELVKVMGHKPENIVIEMARENQTTQKGQKNSRERMKRIEEGIKELGSQILKEHPVENTQLQNEKLYLYYLQNGRDMYVDQELDINRLSDYDVDHIVPQSFIKDDSIDNKVLTRSDKNRGKSDNVPSEEVVKKMKNYWRQLLNAKLITQRKFDNLTKAERGGLSELDKAGFIKRQLVETRQITKHVAQILDSRMNTKYDENDKLIREVKVITLKSKLVSDFRKDFQFYKVREINNYHHAHDAYLNAVVGTALIKKYPKLESEFVYGDYKVYDVRKMIAKSEQEIGKATAKYFFYSNIMNFFKTEITLANGEIRKRPLIETNGETGEIVWDKGRDFATVRKVLSMPQVNIVKKTEVQTGGFSKESILPKRNSDKLIARKKDWDPKKYGGFDSPTVAYSVLVVAKVEKGKSKKLKSVKELLGITIMERSSFEKNPIDFLEAKGYKEVKKDLIIKLPKYSLFELENGRKRMLASAGELQKGNELALPSKYVNFLYLASHYEKLKGSPEDNEQKQLFVEQHKHYLDEIIEQISEFSKRVILADANLDKVLSAYNKHRDKPIREQAENIIHLFTLTNLGAPAAFKYFDTTIDRKRYTSTKEVLDATLIHQSITGLYETRIDLSQLGGD

SEQ ID NO: 200 - DNA, 4212 bp, synthetic construct
  misc_feature 1..4212: note = wild-type Cas9 polynucleotide sequence
  misc_feature 5..58: note = RuvC domain
  misc_feature 718..764: note = RuvC domain
  misc_feature 772..901: note = HNH domain
  misc_feature 906..1101: note = RuvC domain
  source 1..4212: mol_type = other DNA
atggataaaaagtattctattggtttagacatcggcactaattccgttggatgggctgtcataaccgatgaatacaaagtaccttcaaagaaatttaaggtgttggggaacacagaccgtcattcgattaaaaagaatcttatcggtgccctcctattcgatagtggcgaaacggcagaggcgactcgcctgaaacgaaccgctcggagaaggtatacacgtcgcaagaaccgaatatgttacttacaagaaatttttagcaatgagatggccaaagttgacgattctttctttcaccgtttggaagagtccttccttgtcgaagaggacaagaaacatgaacggcaccccatctttggaaacatagtagatgaggtggcatatcatgaaaagtacccaacgatttatcacctcagaaaaaagctagttgactcaactgataaagcggacctgaggttaatctacttggctcttgcccatatgataaagttccgtgggcactttctcattgagggtgatctaaatccggacaactcggatgtcgacaaactgttcatccagttagtacaaacctataatcagttgtttgaagagaaccctataaatgcaagtggcgtggatgcgaaggctattcttagcgcccgcctctctaaatcccgacggctagaaaacctgatcgcacaattacccggagagaagaaaaatgggttgttcggtaaccttatagcgctctcactaggcctgacaccaaattttaagtcgaacttcgacttagctgaagatgccaaattgcagcttagtaaggacacgtacgatgacgatctcgacaatctactggcacaaattggagatcagtatgcggacttatttttggctgccaaaaaccttagcgatgcaatcctcctatctgacatactgagagttaatactgagattaccaaggcgccgttatccgcttcaatgatcaaaaggtacgatgaacatcaccaagacttgacacttctcaaggccctagtccgtcagcaactgcctgagaaatataaggaaatattctttgatcagtcgaaaaacgggtacgcaggttatattgacggcggagcgagtcaagaggaattctacaagtttatcaaacccatattagagaagatggatgggacggaagagttgcttgtaaaactcaatcgcgaagatctactgcgaaagcagcggactttcgacaacggtagcattccacatcaaatccacttaggcgaattgcatgctatacttagaaggcaggaggatttttatccgttcctcaaagacaatcgtgaaaagattgagaaaatcctaacctttcgcataccttactatgtgggacccctggcccgagggaactctcggttcgcatggatgacaagaaagtccgaagaaacgattactccatggaattttgaggaagttgtcgataaaggtgcgtcagctcaatcgttcatcgagaggatgaccaactttgacaagaatttaccgaacgaaaaagtattgcctaagcacagtttactttacgagtatttcacagtgtacaatgaactcacgaaagttaagtatgtcactgagggcatgcgtaaacccgcctttctaagcggagaacagaagaaagcaatagtagatctgttattcaagaccaaccgcaaagtgacagttaagcaattgaaagaggactactttaagaaaattgaatgcttcgattctgtcgagatctccggggtagaagatcgatttaatgcgtcacttggtacgtatcatgacctcctaaagataattaaagataaggacttcctggataacgaagagaatgaagatatcttagaagatatagtgttgactcttaccctctttgaagatcgggaaatgattgaggaaagactaaaaacatacgctcacctgttcgacgataaggttatgaaacagttaaagaggcgtcgctatacgggctggggacgattgtcgcggaaacttatcaacgggataagagacaagcaaagtggtaaaactattctcgattttctaaagagcgacggcttcgccaataggaactttatgcagctgatccatgatgactctttaaccttcaaagaggatatacaaaaggcacaggtttccggacaaggggactcattgcacgaacatattgcgaatcttgctggttcgccagccatcaaaaagggcatactccagacagtcaaagtagtggatgagctagttaaggtcatgggacgtcacaaaccggaaaacattgtaatcgagatggcacgcgaaaatcaaacgactcagaaggggcaaaaaaacagtcgagagcggatgaagagaatagaagagggtattaaagaactgggcagccagatcttaaaggagcatcctgtggaaaatacccaattgcagaacgagaaactttacctctattacctacaaaatggaagggacatgtatgttgatcaggaactggacataaaccgtttatctgattacgacgtcgatcacattgtaccccaatcctttttgaaggacgattcaatcgacaataaagtgcttacacgctcggataagaaccgagggaaaagtgacaatgttccaagcgaggaagtcgtaaagaaaatgaagaactattggcggcagctcctaaatgcgaaactgataacgcaaagaaagttcgataacttaactaaagctgagaggggtggcttgtctgaacttgacaaggccggatttattaaacgtcagctcgtggaaacccgccaaatcacaaagcatgttgcacagatactagattcccgaatgaatacgaaatacgacgagaacgataagctgattcgggaagtcaaagtaatcactttaaagtcaaaattggtgtcggacttcagaaaggattttcaattctataaagttagggagataaataactaccaccatgcgcacgacgcttatcttaatgccgtcgtagggaccgcactcattaagaaatacccgaagctagaaagtgagtttgtgtatggtgattacaaagtttatgacgtccgtaagatgatcgcgaaaagcgaacaggagataggcaaggctacagccaaatacttcttttattctaacattatgaatttctttaagacggaaatcactctggcaaacggagagatacgcaaacgacctttaattgaaaccaatggggagacaggtgaaatcgtatgggataagggccgggacttcgcgacggtgagaaaagttttgtccatgccccaagtcaacatagtaaagaaaactgaggtgcagaccggagggttttcaaaggaatcgattcttccaaaaaggaatagtgataagctcatcgctcgtaaaaaggactgggacccgaaaaagtacggtggcttcgatagccctacagttgcctattctgtcctagtagtggcaaaagttgagaagggaaaatccaagaaactgaagtcagtcaaagaattattggggataacgattatggagcgctcgtcttttgaaaagaaccccatcgacttccttgaggcgaaaggttacaaggaagtaaaaaaggatctcataattaaactaccaaagtatagtctgtttgagttagaaaatggccgaaaacggatgttggctagcgccggagagcttcaaaaggggaacgaactcgcactaccgtctaaatacgtgaatttcctgtatttagcgtcccattacgagaagttgaaaggttcacctgaagataacgaacagaagcaactttttgttgagcagcacaaacattatctcgacgaaatcatagagcaaatttcggaattcagtaagagagtcatcctagctgatgccaatctggacaaagtattaagcgcatacaacaagcacagggataaacccatacgtgagcaggcggaaaatattatccatttgtttactcttaccaacctcggcgctccagccgcattcaagtattttgacacaacgatagatcgcaaacgatacacttctaccaaggaggtgctagacgcgacactgattcaccaatccatcacgggattatatgaaactcggatagatttgtcacagcttgggggtgacggatcccccaagaagaagaggaaagtctcgagcgactacaaagaccatgacggtgattataaagatcatgacatcgattacaaggatgacgatgacaaggctgcagga

SEQ ID NO: 201 - protein, 1368 aa, synthetic construct
  REGION 1..1368: note = exemplary catalytically active Cas9 nickase (nCas9) polypeptide sequence
MDKKYSIGLAIGTNSVGWAVITDEYKVPSKKFKVLGNTDRHSIKKNLIGALLFDSGETAEATRLKRTARRRYTRRKNRICYLQEIFSNEMAKVDDSFFHRLEESFLVEEDKKHERHPIFGNIVDEVAYHEKYPTIYHLRKKLVDSTDKADLRLIYLALAHMIKFRGHFLIEGDLNPDNSDVDKLFIQLVQTYNQLFEENPINASGVDAKAILSARLSKSRRLENLIAQLPGEKKNGLFGNLIALSLGLTPNFKSNFDLAEDAKLQLSKDTYDDDLDNLLAQIGDQYADLFLAAKNLSDAILLSDILRVNTEITKAPLSASMIKRYDEHHQDLTLLKALVRQQLPEKYKEIFFDQSKNGYAGYIDGGASQEEFYKFIKPILEKMDGTEELLVKLNREDLLRKQRTFDNGSIPHQIHLGELHAILRRQEDFYPFLKDNREKIEKILTFRIPYYVGPLARGNSRFAWMTRKSEETITPWNFEEVVDKGASAQSFIERMTNFDKNLPNEKVLPKHSLLYEYFTVYNELTKVKYVTEGMRKPAFLSGEQKKAIVDLLFKTNRKVTVKQLKEDYFKKIECFDSVEISGVEDRFNASLGTYHDLLKIIKDKDFLDNEENEDILEDIVLTLTLFEDREMIEERLKTYAHLFDDKVMKQLKRRRYTGWGRLSRKLINGIRDKQSGKTILDFLKSDGFANRNFMQLIHDDSLTFKEDIQKAQVSGQGDSLHEHIANLAGSPAIKKGILQTVKVVDELVKVMGRHKPENIVIEMARENQTTQKGQKNSRERMKRIEEGIKELGSQILKEHPVENTQLQNEKLYLYYLQNGRDMYVDQELDINRLSDYDVDHIVPQSFLKDDSIDNKVLTRSDKNRGKSDNVPSEEVVKKMKNYWRQLLNAKLITQRKFDNLTKAERGGLSELDKAGFIKRQLVETRQITKHVAQILDSRMNTKYDENDKLIREVKVITLKSKLVSDFRKDFQFYKVREINNYHHAHDAYLNAVVGTALIKKYPKLESEFVYGDYKVYDVRKMIAKSEQEIGKATAKYFFYSNIMNFFKTEITLANGEIRKRPLIETNGETGEIVWDKGRDFATVRKVLSMPQVNIVKKTEVQTGGFSKESILPKRNSDKLIARKKDWDPKKYGGFDSPTVAYSVLVVAKVEKGKSKKLKSVKELLGITIMERSSFEKNPIDFLEAKGYKEVKKDLIIKLPKYSLFELENGRKRMLASAGELQKGNELALPSKYVNFLYLASHYEKLKGSPEDNEQKQLFVEQHKHYLDEIIEQISEFSKRVILADANLDKVLSAYNKHRDKPIREQAENIIHLFTLTNLGAPAAFKYFDTTIDRKRYTSTKEVLDATLIHQSITGLYETRIDLSQLGGD

SEQ ID NO: 202 - DNA, 4107 bp, Streptococcus pyogenes
  misc_feature 1..4107: note = Cas9 from Streptococcus pyogenes (NCBI Ref. Seq.: NC_002737.2)polynucleotide sequence
  source 1..4107: mol_type = genomic DNA
atggataagaaatactcaataggcttagatatcggcacaaatagcgtcggatgggcggtgatcactgatgaatataaggttccgtctaaaaagttcaaggttctgggaaatacagaccgccacagtatcaaaaaaaatcttataggggctcttttatttgacagtggagagacagcggaagcgactcgtctcaaacggacagctcgtagaaggtatacacgtcggaagaatcgtatttgttatctacaggagattttttcaaatgagatggcgaaagtagatgatagtttctttcatcgacttgaagagtcttttttggtggaagaagacaagaagcatgaacgtcatcctatttttggaaatatagtagatgaagttgcttatcatgagaaatatccaactatctatcatctgcgaaaaaaattggtagattctactgataaagcggatttgcgcttaatctatttggccttagcgcatatgattaagtttcgtggtcattttttgattgagggagatttaaatcctgataatagtgatgtggacaaactatttatccagttggtacaaacctacaatcaattatttgaagaaaaccctattaacgcaagtggagtagatgctaaagcgattctttctgcacgattgagtaaatcaagacgattagaaaatctcattgctcagctccccggtgagaagaaaaatggcttatttgggaatctcattgctttgtcattgggtttgacccctaattttaaatcaaattttgatttggcagaagatgctaaattacagctttcaaaagatacttacgatgatgatttagataatttattggcgcaaattggagatcaatatgctgatttgtttttggcagctaagaatttatcagatgctattttactttcagatatcctaagagtaaatactgaaataactaaggctcccctatcagcttcaatgattaaacgctacgatgaacatcatcaagacttgactcttttaaaagctttagttcgacaacaacttccagaaaagtataaagaaatcttttttgatcaatcaaaaaacggatatgcaggttatattgatgggggagctagccaagaagaattttataaatttatcaaaccaattttagaaaaaatggatggtactgaggaattattggtgaaactaaatcgtgaagatttgctgcgcaagcaacggacctttgacaacggctctattccccatcaaattcacttgggtgagctgcatgctattttgagaagacaagaagacttttatccatttttaaaagacaatcgtgagaagattgaaaaaatcttgacttttcgaattccttattatgttggtccattggcgcgtggcaatagtcgttttgcatggatgactcggaagtctgaagaaacaattaccccatggaattttgaagaagttgtcgataaaggtgcttcagctcaatcatttattgaacgcatgacaaactttgataaaaatcttccaaatgaaaaagtactaccaaaacatagtttgctttatgagtattttacggtttataacgaattgacaaaggtcaaatatgttactgaaggaatgcgaaaaccagcatttctttcaggtgaacagaagaaagccattgttgatttactcttcaaaacaaatcgaaaagtaaccgttaagcaattaaaagaagattatttcaaaaaaatagaatgttttgatagtgttgaaatttcaggagttgaagatagatttaatgcttcattaggtacctaccatgatttgctaaaaattattaaagataaagattttttggataatgaagaaaatgaagatatcttagaggatattgttttaacattgaccttatttgaagatagggagatgattgaggaaagacttaaaacatatgctcacctctttgatgataaggtgatgaaacagcttaaacgtcgccgttatactggttggggacgtttgtctcgaaaattgattaatggtattagggataagcaatctggcaaaacaatattagattttttgaaatcagatggttttgccaatcgcaattttatgcagctgatccatgatgatagtttgacatttaaagaagacattcaaaaagcacaagtgtctggacaaggcgatagtttacatgaacatattgcaaatttagctggtagccctgctattaaaaaaggtattttacagactgtaaaagttgttgatgaattggtcaaagtaatggggcggcataagccagaaaatatcgttattgaaatggcacgtgaaaatcagacaactcaaaagggccagaaaaattcgcgagagcgtatgaaacgaatcgaagaaggtatcaaagaattaggaagtcagattcttaaagagcatcctgttgaaaatactcaattgcaaaatgaaaagctctatctctattatctccaaaatggaagagacatgtatgtggaccaagaattagatattaatcgtttaagtgattatgatgtcgatcacattgttccacaaagtttccttaaagacgattcaatagacaataaggtcttaacgcgttctgataaaaatcgtggtaaatcggataacgttccaagtgaagaagtagtcaaaaagatgaaaaactattggagacaacttctaaacgccaagttaatcactcaacgtaagtttgataatttaacgaaagctgaacgtggaggtttgagtgaacttgataaagctggttttatcaaacgccaattggttgaaactcgccaaatcactaagcatgtggcacaaattttggatagtcgcatgaatactaaatacgatgaaaatgataaacttattcgagaggttaaagtgattaccttaaaatctaaattagtttctgacttccgaaaagatttccaattctataaagtacgtgagattaacaattaccatcatgcccatgatgcgtatctaaatgccgtcgttggaactgctttgattaagaaatatccaaaacttgaatcggagtttgtctatggtgattataaagtttatgatgttcgtaaaatgattgctaagtctgagcaagaaataggcaaagcaaccgcaaaatatttcttttactctaatatcatgaacttcttcaaaacagaaattacacttgcaaatggagagattcgcaaacgccctctaatcgaaactaatggggaaactggagaaattgtctgggataaagggcgagattttgccacagtgcgcaaagtattgtccatgccccaagtcaatattgtcaagaaaacagaagtacagacaggcggattctccaaggagtcaattttaccaaaaagaaattcggacaagcttattgctcgtaaaaaagactgggatccaaaaaaatatggtggttttgatagtccaacggtagcttattcagtcctagtggttgctaaggtggaaaaagggaaatcgaagaagttaaaatccgttaaagagttactagggatcacaattatggaaagaagttcctttgaaaaaaatccgattgactttttagaagctaaaggatataaggaagttaaaaaagacttaatcattaaactacctaaatatagtctttttgagttagaaaacggtcgtaaacggatgctggctagtgccggagaattacaaaaaggaaatgagctggctctgccaagcaaatatgtgaattttttatatttagctagtcattatgaaaagttgaagggtagtccagaagataacgaacaaaaacaattgtttgtggagcagcataagcattatttagatgagattattgagcaaatcagtgaattttctaagcgtgttattttagcagatgccaatttagataaagttcttagtgcatataacaaacatagagacaaaccaatacgtgaacaagcagaaaatattattcatttatttacgttgacgaatcttggagctcccgctgcttttaaatattttgatacaacaattgatcgtaaacgatatacgtctacaaaagaagttttagatgccactcttatccatcaatccatcactggtctttatgaaacacgcattgatttgagtcagctaggaggtgactga

SEQ ID NO: 203 - protein, 1368 aa, synthetic construct
  REGION 1..1368: note = catalytically inactive Cas9 (dCas9)polypeptide sequence
  REGION 5..58: note = MISC_FEATURE - RuvC domain
  REGION 718..764: note = MISC_FEATURE - RuvC domain
  REGION 773..902: note = MISC_FEATURE - HNH domain
  REGION 907..1102: note = MISC_FEATURE - RuvC domain
MDKKYSIGLAIGTNSVGWAVITDEYKVPSKKFKVLGNTDRHSIKKNLIGALLFDSGETAEATRLKRTARRRYTRRKNRICYLQEIFSNEMAKVDDSFFHRLEESFLVEEDKKHERHPIFGNIVDEVAYHEKYPTIYHLRKKLVDSTDKADLRLIYLALAHMIKFRGHFLIEGDLNPDNSDVDKLFIQLVQTYNQLFEENPINASGVDAKAILSARLSKSRRLENLIAQLPGEKKNGLFGNLIALSLGLTPNFKSNFDLAEDAKLQLSKDTYDDDLDNLLAQIGDQYADLFLAAKNLSDAILLSDILRVNTEITKAPLSASMIKRYDEHHQDLTLLKALVRQQLPEKYKEIFFDQSKNGYAGYIDGGASQEEFYKFIKPILEKMDGTEELLVKLNREDLLRKQRTFDNGSIPHQIHLGELHAILRRQEDFYPFLKDNREKIEKILTFRIPYYVGPLARGNSRFAWMTRKSEETITPWNFEEVVDKGASAQSFIERMTNFDKNLPNEKVLPKHSLLYEYFTVYNELTKVKYVTEGMRKPAFLSGEQKKAIVDLLFKTNRKVTVKQLKEDYFKKIECFDSVEISGVEDRFNASLGTYHDLLKIIKDKDFLDNEENEDILEDIVLTLTLFEDREMIEERLKTYAHLFDDKVMKQLKRRRYTGWGRLSRKLINGIRDKQSGKTILDFLKSDGFANRNFMQLIHDDSLTFKEDIQKAQVSGQGDSLHEHIANLAGSPAIKKGILQTVKVVDELVKVMGRHKPENIVIEMARENQTTQKGQKNSRERMKRIEEGIKELGSQILKEHPVENTQLQNEKLYLYYLQNGRDMYVDQELDINRLSDYDVDAIVPQSFLKDDSIDNKVLTRSDKNRGKSDNVPSEEVVKKMKNYWRQLLNAKLITQRKFDNLTKAERGGLSELDKAGFIKRQLVETRQITKHVAQILDSRMNTKYDENDKLIREVKVITLKSKLVSDFRKDFQFYKVREINNYHHAHDAYLNAVVGTALIKKYPKLESEFVYGDYKVYDVRKMIAKSEQEIGKATAKYFFYSNIMNFFKTEITLANGEIRKRPLIETNGETGEIVWDKGRDFATVRKVLSMPQVNIVKKTEVQTGGFSKESILPKRNSDKLIARKKDWDPKKYGGFDSPTVAYSVLVVAKVEKGKSKKLKSVKELLGITIMERSSFEKNPIDFLEAKGYKEVKKDLIIKLPKYSLFELENGRKRMLASAGELQKGNELALPSKYVNFLYLASHYEKLKGSPEDNEQKQLFVEQHKHYLDEIIEQISEFSKRVILADANLDKVLSAYNKHRDKPIREQAENIIHLFTLTNLGAPAAFKYFDTTIDRKRYTSTKEVLDATLIHQSITGLYETRIDLSQLGGD

SEQ ID NO: 204 - protein, 345 aa, Sulfolobus islandicus
  REGION 1..345: note = MISC_FEATURE - tr|F0NN87|F0NN87_SULIHCRISPR-associatedCasx protein OS =Sulfolobus islandicus (strain HVE10/4) GN = SiH_0402 PE=4; SV = 1);CasX polypeptide sequence
MEVPLYNIFGDNYIIQVATEAENSTIYNNKVEIDDEELRNVLNLAYKIAKNNEDAAAERRGKAKKKKGEEGETTTSNIILPLSGNDKNPWTETLKCYNFPTTVALSEVFKNFSQVKECEEVSAPSFVKPEFYEFGRSPGMVERTRRVKLEVEPHYLIIAAAGWVLTRLGKAKVSEGDYVGVNVFTPTRGILYSLIQNVNGIVPGIKPETAFGLWIARKVVSSVTNPNVSVVRIYTISDAVGQNPTTINGGFSIDLTKLLEKRYLLSERLEAIARNALSISSNMRERYIVLANYIYEYLTGSKRLEDLLYFANRDLIMNLNSDDGKVRDLKLISAYVNGELIRGEG

SEQ ID NO: 205 - protein, 345 aa, Sulfolobus islandicus
  REGION 1..345: note = MISC_FEATURE - tr|F0NH53|F0NH53_SULIR CRISPR associated protein, Casx OS =Sulfolobus islandicus (strain REY15A) GN=SiRe_0771 PE=4 SV=1);CasX polypeptide sequence
MEVPLYNIFGDNYIIQVATEAENSTIYNNKVEIDDEELRNVLNLAYKIAKNNEDAAAERRGKAKKKKGEEGETTTSNIILPLSGNDKNPWTETLKCYNFPTTVALSEVFKNFSQVKECEEVSAPSFVKPEFYKFGRSPGMVERTRRVKLEVEPHYLIMAAAGWVLTRLGKAKVSEGDYVGVNVFTPTRGILYSLIQNVNGIVPGIKPETAFGLWIARKVVSSVTNPNVSVVSIYTISDAVGQNPTTINGGFSIDLTKLLEKRDLLSERLEAIARNALSISSNMRERYIVLANYIYEYLTGSKRLEDLLYFANRDLIMNLNSDDGKVRDLKLISAYVNGELIRGEG

SEQ ID NO: 206 - protein, 987 aa, unidentified
  REGION 1..987: note = MISC_FEATURE - CasX polypeptide sequence
MEKRINKIRKKLSADNATKPVSRSGPMKTLLVRVMTDDLKKRLEKRRKKPEVMPQVISNNAANNLRMLLDDYTKMKEAILQVYWQEFKDDHVGLMCKFAQPASKKIDQNKLKPEMDEKGNLTTAGFACSQCGQPLFVYKLEQVSEKGKAYTNYFGRCNVAEHEKLILLAQLKPVKDSDEAVTYSLGKFGQRALDFYSIHVTKESTHPVKPLAQIAGNRYASGPVGKALSDACMGTIASFLSKYQDIIIEHQKVVKGNQKRLESLRELAGKENLEYPSVTLPPQPHTKEGVDFAYNEVIARVRMWVNLNLWQKLKLSRDDAKPLLRLKGFPSFPVVERRENEVDWWNTINEVKKLIDAKRDMGRVFWSGVTAEKRNTILEGYNYLPNENDHKKREGSLENPKKPAKRQFGDLLLYLEKKYAGDWGKVFDEAWERIDKKIAGLTSHIEREEARNAEDAQSKAVLTDWLRAKASFVLERLKEMDEKEFYACEIQLQKWYGDLRGNPFAVEAENRVVDISGFSIGSDGHSIQYRNLLAWKYLENGKREFYLLMNYGKKGRIRFTDGTDIKKSGKWQGLLYGGGKAKVIDLTFDPDDEQLIILPLAFGTRQGREFIWNDLLSLETGLIKLANGRVIEKTIYNKKIGRDEPALFVALTFERREVVDPSNIKPVNLIGVARGENIPAVIALTDPEGCPLPEFKDSSGGPTDILRIGEGYKEKQRAIQAAKEVEQRRAGGYSRKFASKSRNLADDMVRNSARDLFYHAVTHDAVLVFANLSRGFGRQGKRTFMTERQYTKMEDWLTAKLAYEGLTSKTYLSKTLAQYTSKTCSNCGFTITYADMDVMLVRLKKTSDGWATTLNNKELKAEYQITYYNRYKRQTVEKELSAELDRLSEESGNNDISKWTKGRRDEALFLLKKRFSHRPVQEQFVCLDCGHEVHAAEQAALNIARSWLFLNSNSTEFKSYKSGKQPFVGAWQAFYKRRLKEVWKPNA

SEQ ID NO: 207 - protein, 1210 aa, unidentified
  REGION 1..1210: note = MISC_FEATURE - APG80656.1 CRISPR-associated protein CasY [uncultured Parcubacteria group bacterium]; CasY polypeptide sequence
MSKRHPRISGVKGYRLHAQRLEYTGKSGAMRTIKYPLYSSPSGGRTVPREIVSAINDDYVGLYGLSNFDDLYNAEKRNEEKVYSVLDFWYDCVQYGAVFSYTAPGLLKNVAEVRGGSYELTKTLKGSHLYDELQIDKVIKFLNKKEISRANGSLDKLKKDIIDCFKAEYRERHKDQCNKLADDIKNAKKDAGASLGERQKKLFRDFFGISEQSENDKPSFTNPLNLTCCLLPFDTVNNNRNRGEVLFNKLKEYAQKLDKNEGSLEMWEYIGIGNSGTAFSNFLGEGFLGRLRENKITELKKAMMDITDAWRGQEQEEELEKRLRILAALTIKLREPKFDNHWGGYRSDINGKLSSWLQNYINQTVKIKEDLKGHKKDLKKAKEMINRFGESDTKEEAVVSSLLESIEKIVPDDSADDEKPDIPAIAIYRRFLSDGRLTLNRFVQREDVQEALIKERLEAEKKKKPKKRKKKSDAEDEKETIDFKELFPHLAKPLKLVPNFYGDSKRELYKKYKNAAIYTDALWKAVEKIYKSAFSSSLKNSFFDTDFDKDFFIKRLQKIFSVYRRFNTDKWKPIVKNSFAPYCDIVSLAENEVLYKPKQSRSRKSAAIDKNRVRLPSTENIAKAGIALARELSVAGFDWKDLLKKEEHEEYIDLIELHKTALALLLAVTETQLDISALDFVENGTVKDFMKTRDGNLVLEGRFLEMFSQSIVFSELRGLAGLMSRKEFITRSAIQTMNGKQAELLYIPHEFQSAKITTPKEMSRAFLDLAPAEFATSLEPESLSEKSLLKLKQMRYYPHYFGYELTRTGQGIDGGVAENALRLEKSPVKKREIKCKQYKTLGRGQNKIVLYVRSSYYQTQFLEWFLHRPKNVQTDVAVSGSFLIDEKKVKTRWNYDALTVALEPVSGSERVFVSQPFTIFPEKSAEEEGQRYLGIDIGEYGIAYTALEITGDSAKILDQNFISDPQLKTLREEVKGLKLDQRRGTFAMPSTKIARIRESLVHSLRNRIHHLALKHKAKIVYELEVSRFEEGKQKIKKVYATLKKADVYSEIDADKNLQTTVWGKLAVASEISASYTSQFCGACKKLWRAEMQVDETITTQELIGTVRVIKGGTLIDAIKDFMRPPIFDENDTPFPKYRDFCDKHHISKKMRGNSCLFICPFCRANADADIQASQTIALLRYVKEEKKVEDYFERFRKLKNIKVLGQMKKI

SEQ ID NO: 208 - protein, 1082 aa, Neisseria meningitidis
  REGION 1..1082: note = MISC_FEATURE - NCBI Reference: WP_002235162.1; type II CRISPR RNA-guided endonuclease Cas9; Nme1Cas9 polypeptide sequence
MAAFKPNPINYILGLDIGIASVGWAMVEIDEDENPICLIDLGVRVFERAEVPKTGDSLAMARRLARSVRRLTRRRAHRLLRARRLLKREGVLQAADFDENGLIKSLPNTPWQLRAAALDRKLTPLEWSAVLLHLIKHRGYLSQRKNEGETADKELGALLKGVADNAHALQTGDFRTPAELALNKFEKESGHIRNQRGDYSHTFSRKDLQAELILLFEKQKEFGNPHVSGGLKEGIETLLMTQRPALSGDAVQKMLGHCTFEPAEPKAAKNTYTAERFIWLTKLNNLRILEQGSERPLTDTERATLMDEPYRKSKLTYAQARKLLGLEDTAFFKGLRYGKDNAEASTLMEMKAYHAISRALEKEGLKDKKSPLNLSPELQDEIGTAFSLFKTDEDITGRLKDRIQPEILEALLKHISFDKFVQISLKALRRIVPLMEQGKRYDEACAEIYGDHYGKKNTEEKIYLPPIPADEIRNPVVLRALSQARKVINGVVRRYGSPARIHIETAREVGKSFKDRKEIEKRQEENRKDREKAAAKFREYFPNFVGEPKSKDILKLRLYEQQHGKCLYSGKEINLGRLNEKGYVEIDHALPFSRTWDDSFNNKVLVLGSENQNKGNQTPYEYFNGKDNSREWQEFKARVETSRFPRSKKQRILLQKFDEDGFKERNLNDTRYVNRFLCQFVADRMRLTGKGKKRVFASNGQITNLLRGFWGLRKVRAENDRHHALDAVVVACSTVAMQQKITRFVRYKEMNAFDGKTIDKETGEVLHQKTHFPQPWEFFAQEVMIRVFGKPDGKPEFEEADTPEKLRTLLAEKLSSRPEAVHEYVTPLFVSRAPNRKMSGQGHMETVKSAKRLDEGVSVLRVPLTQLKLKDLEKMVNREREPKLYEALKARLEAHKDDPAKAFAEPFYKYDKAGNRTQQVKAVRVEQVQKTGVWVRNHNGIADNATMVRVDVFEKGDKYYLVPIYSWQVAKGILPDRAVVQGKDEEDWQLIDDSFNFKFSLHPNDLVEVITKKARMFGYFASCHRGTGNINIRIHDLDHKIGKNGILEGIGVKTALSFQKYQIDELGKEIRPCRLKKRPPVR

SEQ ID NO: 209 - protein, 1082 aa, Neisseria meningitidis
  REGION 1..1082: note = MISC_FEATURE - NCBI Reference: WP_002230835; type II CRISPR RNA-guided endonuclease Cas9; Nme2Cas9 polypeptide sequence
MAAFKPNPINYILGLDIGIASVGWAMVEIDEEENPIRLIDLGVRVFERAEVPKTGDSLAMARRLARSVRRLTRRRAHRLLRARRLLKREGVLQAADFDENGLIKSLPNTPWQLRAAALDRKLTPLEWSAVLLHLIKHRGYLSQRKNEGETADKELGALLKGVANNAHALQTGDFRTPAELALNKFEKESGHIRNQRGDYSHTFSRKDLQAELILLFEKQKEFGNPHVSGGLKEGIETLLMTQRPALSGDAVQKMLGHCTFEPAEPKAAKNTYTAERFIWLTKLNNLRILEQGSERPLTDTERATLMDEPYRKSKLTYAQARKLLGLEDTAFFKGLRYGKDNAEASTLMEMKAYHAISRALEKEGLKDKKSPLNLSSELQDEIGTAFSLFKTDEDITGRLKDRVQPEILEALLKHISFDKFVQISLKALRRIVPLMEQGKRYDEACAEIYGDHYGKKNTEEKIYLPPIPADEIRNPVVLRALSQARKVINGVVRRYGSPARIHIETAREVGKSFKDRKEIEKRQEENRKDREKAAAKFREYFPNFVGEPKSKDILKLRLYEQQHGKCLYSGKEINLVRLNEKGYVEIDHALPFSRTWDDSFNNKVLVLGSENQNKGNQTPYEYFNGKDNSREWQEFKARVETSRFPRSKKQRILLQKFDEDGFKECNLNDTRYVNRFLCQFVADHILLTGKGKRRVFASNGQITNLLRGFWGLRKVRAENDRHHALDAVVVACSTVAMQQKITRFVRYKEMNAFDGKTIDKETGKVLHQKTHFPQPWEFFAQEVMIRVFGKPDGKPEFEEADTPEKLRTLLAEKLSSRPEAVHEYVTPLFVSRAPNRKMSGAHKDTLRSAKRFVKHNEKISVKRVWLTEIKLADLENMVNYKNGREIELYEALKARLEAYGGNAKQAFDPKDNPFYKKGGQLVKAVRVEKTQESGVLLNKKNAYTIADNGDMVRVDVFCKVDKKGKNQYFIVPIYAWQVAENILPDIDCKGYRIDDSYTFCFSLHKYDLIAFQKDEKSKVEFAYYINCDSSNGRFYLAWHDKGSKEQQFRISTQNLVLIQKYQVNELGKEIRPCRLKKRPPVR

SEQ ID NO: 210 - protein, 1300 aa, Francisella novicida
  REGION 1..1300: note = MISC_FEATURE - wild type Cpf1 polypeptide sequence
MSIYQEFVNKYSLSKTLRFELIPQGKTLENIKARGLILDDEKRAKDYKKAKQIIDKYHQFFIEEILSSVCISEDLLQNYSDVYFKLKKSDDDNLQKDFKSAKDTIKKQISEYIKDSEKFKNLFNQNLIDAKKGQESDLILWLKQSKDNGIELFKANSDITDIDEALEIIKSFKGWTTYFKGFHENRKNVYSSNDIPTSIIYRIVDDNLPKFLENKAKYESLKDKAPEAINYEQIKKDLAEELTFDIDYKTSEVNQRVFSLDEVFEIANFNNYLNQSGITKFNTIIGGKFVNGENTKRKGINEYINLYSQQINDKTLKKYKMSVLFKQILSDTESKSFVIDKLEDDSDVVTTMQSFYEQIAAFKTVEEKSIKETLSLLFDDLKAQKLDLSKIYFKNDKSLTDLSQQVFDDYSVIGTAVLEYITQQIAPKNLDNPSKKEQELIAKKTEKAKYLSLETIKLALEEFNKHRDIDKQCRFEEILANFAAIPMIFDEIAQNKDNLAQISIKYQNQGKKDLLQASAEDDVKAIKDLLDQTNNLLHKLKIFHISQSEDKANILDKDEHFYLVFEECYFELANIVPLYNKIRNYITQKPYSDEKFKLNFENSTLANGWDKNKEPDNTAILFIKDDKYYLGVMNKKNNKIFDDKAIKENKGEGYKKIVYKLLPGANKMLPKVFFSAKSIKFYNPSEDILRIRNHSTHTKNGSPQKGYEKFEFNIEDCRKFIDFYKQSISKHPEWKDFGFRFSDTQRYNSIDEFYREVENQGYKLTFENISESYIDSVVNQGKLYLFQIYNKDFSAYSKGRPNLHTLYWKALFDERNLQDVVYKLNGEAELFYRKQSIPKKITHPAKEAIANKNKDNPKKESVFEYDLIKDKRFTEDKFFFHCPITINFKSSGANKFNDEINLLLKEKANDVHILSIDRGERHLAYYTLVDGKGNIIKQDTFNIIGNDRMKTNYHDKLAAIEKDRDSARKDWKKINNIKEMKEGYLSQVVHEIAKLVIEYNAIVVFEDLNFGFKRGRFKVEKQVYQKLEKMLIEKLNYLVFKDNEFDKTGGVLRAYQLTAPFETFKKMGKQTGIIYYVPAGFTSKICPVTGFVNQLYPKYESVSKSQEFFSKFDKICYNLDKGYFEFSFDYKNFGDKAAKGKWTIASFGSRLINFRNSDKNHNWDTREVYPTKELEKLLKDYSIEYGHGECIKAAICGESDKKFFAKLTSVLNTILQMRNSKTGTELDYLISPVADVNGNFFDSRQAPKNMPQDADANGAYHIGLKGLMLLGRIKNNQEGKKLNLVIKNEEYFEFVQNRNN

SEQ ID NO: 211 - protein, 1300 aa, Francisella novicida
  REGION 1..1300: note = MISC_FEATURE - Cpf1 D917A polypeptide sequence
MSIYQEFVNKYSLSKTLRFELIPQGKTLENIKARGLILDDEKRAKDYKKAKQIIDKYHQFFIEEILSSVCISEDLLQNYSDVYFKLKKSDDDNLQKDFKSAKDTIKKQISEYIKDSEKFKNLFNQNLIDAKKGQESDLILWLKQSKDNGIELFKANSDITDIDEALEIIKSFKGWTTYFKGFHENRKNVYSSNDIPTSIIYRIVDDNLPKFLENKAKYESLKDKAPEAINYEQIKKDLAEELTFDIDYKTSEVNQRVFSLDEVFEIANFNNYLNQSGITKFNTIIGGKFVNGENTKRKGINEYINLYSQQINDKTLKKYKMSVLFKQILSDTESKSFVIDKLEDDSDVVTTMQSFYEQIAAFKTVEEKSIKETLSLLFDDLKAQKLDLSKIYFKNDKSLTDLSQQVFDDYSVIGTAVLEYITQQIAPKNLDNPSKKEQELIAKKTEKAKYLSLETIKLALEEFNKHRDIDKQCRFEEILANFAAIPMIFDEIAQNKDNLAQISIKYQNQGKKDLLQASAEDDVKAIKDLLDQTNNLLHKLKIFHISQSEDKANILDKDEHFYLVFEECYFELANIVPLYNKIRNYITQKPYSDEKFKLNFENSTLANGWDKNKEPDNTAILFIKDDKYYLGVMNKKNNKIFDDKAIKENKGEGYKKIVYKLLPGANKMLPKVFFSAKSIKFYNPSEDILRIRNHSTHTKNGSPQKGYEKFEFNIEDCRKFIDFYKQSISKHPEWKDFGFRFSDTQRYNSIDEFYREVENQGYKLTFENISESYIDSVVNQGKLYLFQIYNKDFSAYSKGRPNLHTLYWKALFDERNLQDVVYKLNGEAELFYRKQSIPKKITHPAKEAIANKNKDNPKKESVFEYDLIKDKRFTEDKFFFHCPITINFKSSGANKFNDEINLLLKEKANDVHILSIARGERHLAYYTLVDGKGNIIKQDTFNIIGNDRMKTNYHDKLAAIEKDRDSARKDWKKINNIKEMKEGYLSQVVHEIAKLVIEYNAIVVFEDLNFGFKRGRFKVEKQVYQKLEKMLIEKLNYLVFKDNEFDKTGGVLRAYQLTAPFETFKKMGKQTGIIYYVPAGFTSKICPVTGFVNQLYPKYESVSKSQEFFSKFDKICYNLDKGYFEFSFDYKNFGDKAAKGKWTIASFGSRLINFRNSDKNHNWDTREVYPTKELEKLLKDYSIEYGHGECIKAAICGESDKKFFAKLTSVLNTILQMRNSKTGTELDYLISPVADVNGNFFDSRQAPKNMPQDADANGAYHIGLKGLMLLGRIKNNQEGKKLNLVIKNEEYFEFVQNRNN

SEQ ID NO: 212 - protein, 1300 aa, Francisella novicida
  REGION 1..1300: note = MISC_FEATURE - Cpf1 E1006A polypeptide sequence
MSIYQEFVNKYSLSKTLRFELIPQGKTLENIKARGLILDDEKRAKDYKKAKQIIDKYHQFFIEEILSSVCISEDLLQNYSDVYFKLKKSDDDNLQKDFKSAKDTIKKQISEYIKDSEKFKNLFNQNLIDAKKGQESDLILWLKQSKDNGIELFKANSDITDIDEALEIIKSFKGWTTYFKGFHENRKNVYSSNDIPTSIIYRIVDDNLPKFLENKAKYESLKDKAPEAINYEQIKKDLAEELTFDIDYKTSEVNQRVFSLDEVFEIANFNNYLNQSGITKFNTIIGGKFVNGENTKRKGINEYINLYSQQINDKTLKKYKMSVLFKQILSDTESKSFVIDKLEDDSDVVTTMQSFYEQIAAFKTVEEKSIKETLSLLFDDLKAQKLDLSKIYFKNDKSLTDLSQQVFDDYSVIGTAVLEYITQQIAPKNLDNPSKKEQELIAKKTEKAKYLSLETIKLALEEFNKHRDIDKQCRFEEILANFAAIPMIFDEIAQNKDNLAQISIKYQNQGKKDLLQASAEDDVKAIKDLLDQTNNLLHKLKIFHISQSEDKANILDKDEHFYLVFEECYFELANIVPLYNKIRNYITQKPYSDEKFKLNFENSTLANGWDKNKEPDNTAILFIKDDKYYLGVMNKKNNKIFDDKAIKENKGEGYKKIVYKLLPGANKMLPKVFFSAKSIKFYNPSEDILRIRNHSTHTKNGSPQKGYEKFEFNIEDCRKFIDFYKQSISKHPEWKDFGFRFSDTQRYNSIDEFYREVENQGYKLTFENISESYIDSVVNQGKLYLFQIYNKDFSAYSKGRPNLHTLYWKALFDERNLQDVVYKLNGEAELFYRKQSIPKKITHPAKEAIANKNKDNPKKESVFEYDLIKDKRFTEDKFFFHCPITINFKSSGANKFNDEINLLLKEKANDVHILSIDRGERHLAYYTLVDGKGNIIKQDTFNIIGNDRMKTNYHDKLAAIEKDRDSARKDWKKINNIKEMKEGYLSQVVHEIAKLVIEYNAIVVFADLNFGFKRGRFKVEKQVYQKLEKMLIEKLNYLVFKDNEFDKTGGVLRAYQLTAPFETFKKMGKQTGIIYYVPAGFTSKICPVTGFVNQLYPKYESVSKSQEFFSKFDKICYNLDKGYFEFSFDYKNFGDKAAKGKWTIASFGSRLINFRNSDKNHNWDTREVYPTKELEKLLKDYSIEYGHGECIKAAICGESDKKFFAKLTSVLNTILQMRNSKTGTELDYLISPVADVNGNFFDSRQAPKNMPQDADANGAYHIGLKGLMLLGRIKNNQEGKKLNLVIKNEEYFEFVQNRNN

SEQ ID NO: 213 - protein, 1300 aa, Francisella novicida
  REGION 1..1300: note = MISC_FEATURE - Cpf1 D1255A polypeptide sequence
MSIYQEFVNKYSLSKTLRFELIPQGKTLENIKARGLILDDEKRAKDYKKAKQIIDKYHQFFIEEILSSVCISEDLLQNYSDVYFKLKKSDDDNLQKDFKSAKDTIKKQISEYIKDSEKFKNLFNQNLIDAKKGQESDLILWLKQSKDNGIELFKANSDITDIDEALEIIKSFKGWTTYFKGFHENRKNVYSSNDIPTSIIYRIVDDNLPKFLENKAKYESLKDKAPEAINYEQIKKDLAEELTFDIDYKTSEVNQRVFSLDEVFEIANFNNYLNQSGITKFNTIIGGKFVNGENTKRKGINEYINLYSQQINDKTLKKYKMSVLFKQILSDTESKSFVIDKLEDDSDVVTTMQSFYEQIAAFKTVEEKSIKETLSLLFDDLKAQKLDLSKIYFKNDKSLTDLSQQVFDDYSVIGTAVLEYITQQIAPKNLDNPSKKEQELIAKKTEKAKYLSLETIKLALEEFNKHRDIDKQCRFEEILANFAAIPMIFDEIAQNKDNLAQISIKYQNQGKKDLLQASAEDDVKAIKDLLDQTNNLLHKLKIFHISQSEDKANILDKDEHFYLVFEECYFELANIVPLYNKIRNYITQKPYSDEKFKLNFENSTLANGWDKNKEPDNTAILFIKDDKYYLGVMNKKNNKIFDDKAIKENKGEGYKKIVYKLLPGANKMLPKVFFSAKSIKFYNPSEDILRIRNHSTHTKNGSPQKGYEKFEFNIEDCRKFIDFYKQSISKHPEWKDFGFRFSDTQRYNSIDEFYREVENQGYKLTFENISESYIDSVVNQGKLYLFQIYNKDFSAYSKGRPNLHTLYWKALFDERNLQDVVYKLNGEAELFYRKQSIPKKITHPAKEAIANKNKDNPKKESVFEYDLIKDKRFTEDKFFFHCPITINFKSSGANKFNDEINLLLKEKANDVHILSIDRGERHLAYYTLVDGKGNIIKQDTFNIIGNDRMKTNYHDKLAAIEKDRDSARKDWKKINNIKEMKEGYLSQVVHEIAKLVIEYNAIVVFEDLNFGFKRGRFKVEKQVYQKLEKMLIEKLNYLVFKDNEFDKTGGVLRAYQLTAPFETFKKMGKQTGIIYYVPAGFTSKICPVTGFVNQLYPKYESVSKSQEFFSKFDKICYNLDKGYFEFSFDYKNFGDKAAKGKWTIASFGSRLINFRNSDKNHNWDTREVYPTKELEKLLKDYSIEYGHGECIKAAICGESDKKFFAKLTSVLNTILQMRNSKTGTELDYLISPVADVNGNFFDSRQAPKNMPQDAAANGAYHIGLKGLMLLGRIKNNQEGKKLNLVIKNEEYFEFVQNRNN

SEQ ID NO: 214 - protein, 1300 aa, Francisella novicida
  REGION 1..1300: note = MISC_FEATURE - Cpf1 D917A/E1006A polypeptide sequence
MSIYQEFVNKYSLSKTLRFELIPQGKTLENIKARGLILDDEKRAKDYKKAKQIIDKYHQFFIEEILSSVCISEDLLQNYSDVYFKLKKSDDDNLQKDFKSAKDTIKKQISEYIKDSEKFKNLFNQNLIDAKKGQESDLILWLKQSKDNGIELFKANSDITDIDEALEIIKSFKGWTTYFKGFHENRKNVYSSNDIPTSIIYRIVDDNLPKFLENKAKYESLKDKAPEAINYEQIKKDLAEELTFDIDYKTSEVNQRVFSLDEVFEIANFNNYLNQSGITKFNTIIGGKFVNGENTKRKGINEYINLYSQQINDKTLKKYKMSVLFKQILSDTESKSFVIDKLEDDSDVVTTMQSFYEQIAAFKTVEEKSIKETLSLLFDDLKAQKLDLSKIYFKNDKSLTDLSQQVFDDYSVIGTAVLEYITQQIAPKNLDNPSKKEQELIAKKTEKAKYLSLETIKLALEEFNKHRDIDKQCRFEEILANFAAIPMIFDEIAQNKDNLAQISIKYQNQGKKDLLQASAEDDVKAIKDLLDQTNNLLHKLKIFHISQSEDKANILDKDEHFYLVFEECYFELANIVPLYNKIRNYITQKPYSDEKFKLNFENSTLANGWDKNKEPDNTAILFIKDDKYYLGVMNKKNNKIFDDKAIKENKGEGYKKIVYKLLPGANKMLPKVFFSAKSIKFYNPSEDILRIRNHSTHTKNGSPQKGYEKFEFNIEDCRKFIDFYKQSISKHPEWKDFGFRFSDTQRYNSIDEFYREVENQGYKLTFENISESYIDSVVNQGKLYLFQIYNKDFSAYSKGRPNLHTLYWKALFDERNLQDVVYKLNGEAELFYRKQSIPKKITHPAKEAIANKNKDNPKKESVFEYDLIKDKRFTEDKFFFHCPITINFKSSGANKFNDEINLLLKEKANDVHILSIARGERHLAYYTLVDGKGNIIKQDTFNIIGNDRMKTNYHDKLAAIEKDRDSARKDWKKINNIKEMKEGYLSQVVHEIAKLVIEYNAIVVFADLNFGFKRGRFKVEKQVYQKLEKMLIEKLNYLVFKDNEFDKTGGVLRAYQLTAPFETFKKMGKQTGIIYYVPAGFTSKICPVTGFVNQLYPKYESVSKSQEFFSKFDKICYNLDKGYFEFSFDYKNFGDKAAKGKWTIASFGSRLINFRNSDKNHNWDTREVYPTKELEKLLKDYSIEYGHGECIKAAICGESDKKFFAKLTSVLNTILQMRNSKTGTELDYLISPVADVNGNFFDSRQAPKNMPQDADANGAYHIGLKGLMLLGRIKNNQEGKKLNLVIKNEEYFEFVQNRNN

SEQ ID NO: 215 - protein, 1300 aa, Francisella novicida
  REGION 1..1300: note = MISC_FEATURE - Cpf1 D917A/D1255A polypeptide sequence
MSIYQEFVNKYSLSKTLRFELIPQGKTLENIKARGLILDDEKRAKDYKKAKQIIDKYHQFFIEEILSSVCISEDLLQNYSDVYFKLKKSDDDNLQKDFKSAKDTIKKQISEYIKDSEKFKNLFNQNLIDAKKGQESDLILWLKQSKDNGIELFKANSDITDIDEALEIIKSFKGWTTYFKGFHENRKNVYSSNDIPTSIIYRIVDDNLPKFLENKAKYESLKDKAPEAINYEQIKKDLAEELTFDIDYKTSEVNQRVFSLDEVFEIANFNNYLNQSGITKFNTIIGGKFVNGENTKRKGINEYINLYSQQINDKTLKKYKMSVLFKQILSDTESKSFVIDKLEDDSDVVTTMQSFYEQIAAFKTVEEKSIKETLSLLFDDLKAQKLDLSKIYFKNDKSLTDLSQQVFDDYSVIGTAVLEYITQQIAPKNLDNPSKKEQELIAKKTEKAKYLSLETIKLALEEFNKHRDIDKQCRFEEILANFAAIPMIFDEIAQNKDNLAQISIKYQNQGKKDLLQASAEDDVKAIKDLLDQTNNLLHKLKIFHISQSEDKANILDKDEHFYLVFEECYFELANIVPLYNKIRNYITQKPYSDEKFKLNFENSTLANGWDKNKEPDNTAILFIKDDKYYLGVMNKKNNKIFDDKAIKENKGEGYKKIVYKLLPGANKMLPKVFFSAKSIKFYNPSEDILRIRNHSTHTKNGSPQKGYEKFEFNIEDCRKFIDFYKQSISKHPEWKDFGFRFSDTQRYNSIDEFYREVENQGYKLTFENISESYIDSVVNQGKLYLFQIYNKDFSAYSKGRPNLHTLYWKALFDERNLQDVVYKLNGEAELFYRKQSIPKKITHPAKEAIANKNKDNPKKESVFEYDLIKDKRFTEDKFFFHCPITINFKSSGANKFNDEINLLLKEKANDVHILSIARGERHLAYYTLVDGKGNIIKQDTFNIIGNDRMKTNYHDKLAAIEKDRDSARKDWKKINNIKEMKEGYLSQVVHEIAKLVIEYNAIVVFEDLNFGFKRGRFKVEKQVYQKLEKMLIEKLNYLVFKDNEFDKTGGVLRAYQLTAPFETFKKMGKQTGIIYYVPAGFTSKICPVTGFVNQLYPKYESVSKSQEFFSKFDKICYNLDKGYFEFSFDYKNFGDKAAKGKWTIASFGSRLINFRNSDKNHNWDTREVYPTKELEKLLKDYSIEYGHGECIKAAICGESDKKFFAKLTSVLNTILQMRNSKTGTELDYLISPVADVNGNFFDSRQAPKNMPQDAAANGAYHIGLKGLMLLGRIKNNQEGKKLNLVIKNEEYFEFVQNRNN

SEQ ID NO: 216 - protein, 1300 aa, Francisella novicida
  REGION 1..1300: note = MISC_FEATURE - Cpf1 E1006A/D1255A polypeptide sequence
MSIYQEFVNKYSLSKTLRFELIPQGKTLENIKARGLILDDEKRAKDYKKAKQIIDKYHQFFIEEILSSVCISEDLLQNYSDVYFKLKKSDDDNLQKDFKSAKDTIKKQISEYIKDSEKFKNLFNQNLIDAKKGQESDLILWLKQSKDNGIELFKANSDITDIDEALEIIKSFKGWTTYFKGFHENRKNVYSSNDIPTSIIYRIVDDNLPKFLENKAKYESLKDKAPEAINYEQIKKDLAEELTFDIDYKTSEVNQRVFSLDEVFEIANFNNYLNQSGITKFNTIIGGKFVNGENTKRKGINEYINLYSQQINDKTLKKYKMSVLFKQILSDTESKSFVIDKLEDDSDVVTTMQSFYEQIAAFKTVEEKSIKETLSLLFDDLKAQKLDLSKIYFKNDKSLTDLSQQVFDDYSVIGTAVLEYITQQIAPKNLDNPSKKEQELIAKKTEKAKYLSLETIKLALEEFNKHRDIDKQCRFEEILANFAAIPMIFDEIAQNKDNLAQISIKYQNQGKKDLLQASAEDDVKAIKDLLDQTNNLLHKLKIFHISQSEDKANILDKDEHFYLVFEECYFELANIVPLYNKIRNYITQKPYSDEKFKLNFENSTLANGWDKNKEPDNTAILFIKDDKYYLGVMNKKNNKIFDDKAIKENKGEGYKKIVYKLLPGANKMLPKVFFSAKSIKFYNPSEDILRIRNHSTHTKNGSPQKGYEKFEFNIEDCRKFIDFYKQSISKHPEWKDFGFRFSDTQRYNSIDEFYREVENQGYKLTFENISESYIDSVVNQGKLYLFQIYNKDFSAYSKGRPNLHTLYWKALFDERNLQDVVYKLNGEAELFYRKQSIPKKITHPAKEAIANKNKDNPKKESVFEYDLIKDKRFTEDKFFFHCPITINFKSSGANKFNDEINLLLKEKANDVHILSIDRGERHLAYYTLVDGKGNIIKQDTFNIIGNDRMKTNYHDKLAAIEKDRDSARKDWKKINNIKEMKEGYLSQVVHEIAKLVIEYNAIVVFADLNFGFKRGRFKVEKQVYQKLEKMLIEKLNYLVFKDNEFDKTGGVLRAYQLTAPFETFKKMGKQTGIIYYVPAGFTSKICPVTGFVNQLYPKYESVSKSQEFFSKFDKICYNLDKGYFEFSFDYKNFGDKAAKGKWTIASFGSRLINFRNSDKNHNWDTREVYPTKELEKLLKDYSIEYGHGECIKAAICGESDKKFFAKLTSVLNTILQMRNSKTGTELDYLISPVADVNGNFFDSRQAPKNMPQDAAANGAYHIGLKGLMLLGRIKNNQEGKKLNLVIKNEEYFEFVQNRNN

SEQ ID NO: 217 - protein, 1300 aa, Francisella novicida
  REGION 1..1300: note = MISC_FEATURE - Cpf1 D917A/E1006A/D1255A polypeptide sequence
MSIYQEFVNKYSLSKTLRFELIPQGKTLENIKARGLILDDEKRAKDYKKAKQIIDKYHQFFIEEILSSVCISEDLLQNYSDVYFKLKKSDDDNLQKDFKSAKDTIKKQISEYIKDSEKFKNLFNQNLIDAKKGQESDLILWLKQSKDNGIELFKANSDITDIDEALEIIKSFKGWTTYFKGFHENRKNVYSSNDIPTSIIYRIVDDNLPKFLENKAKYESLKDKAPEAINYEQIKKDLAEELTFDIDYKTSEVNQRVFSLDEVFEIANFNNYLNQSGITKFNTIIGGKFVNGENTKRKGINEYINLYSQQINDKTLKKYKMSVLFKQILSDTESKSFVIDKLEDDSDVVTTMQSFYEQIAAFKTVEEKSIKETLSLLFDDLKAQKLDLSKIYFKNDKSLTDLSQQVFDDYSVIGTAVLEYITQQIAPKNLDNPSKKEQELIAKKTEKAKYLSLETIKLALEEFNKHRDIDKQCRFEEILANFAAIPMIFDEIAQNKDNLAQISIKYQNQGKKDLLQASAEDDVKAIKDLLDQTNNLLHKLKIFHISQSEDKANILDKDEHFYLVFEECYFELANIVPLYNKIRNYITQKPYSDEKFKLNFENSTLANGWDKNKEPDNTAILFIKDDKYYLGVMNKKNNKIFDDKAIKENKGEGYKKIVYKLLPGANKMLPKVFFSAKSIKFYNPSEDILRIRNHSTHTKNGSPQKGYEKFEFNIEDCRKFIDFYKQSISKHPEWKDFGFRFSDTQRYNSIDEFYREVENQGYKLTFENISESYIDSVVNQGKLYLFQIYNKDFSAYSKGRPNLHTLYWKALFDERNLQDVVYKLNGEAELFYRKQSIPKKITHPAKEAIANKNKDNPKKESVFEYDLIKDKRFTEDKFFFHCPITINFKSSGANKFNDEINLLLKEKANDVHILSIARGERHLAYYTLVDGKGNIIKQDTFNIIGNDRMKTNYHDKLAAIEKDRDSARKDWKKINNIKEMKEGYLSQVVHEIAKLVIEYNAIVVFADLNFGFKRGRFKVEKQVYQKLEKMLIEKLNYLVFKDNEFDKTGGVLRAYQLTAPFETFKKMGKQTGIIYYVPAGFTSKICPVTGFVNQLYPKYESVSKSQEFFSKFDKICYNLDKGYFEFSFDYKNFGDKAAKGKWTIASFGSRLINFRNSDKNHNWDTREVYPTKELEKLLKDYSIEYGHGECIKAAICGESDKKFFAKLTSVLNTILQMRNSKTGTELDYLISPVADVNGNFFDSRQAPKNMPQDAAANGAYHIGLKGLMLLGRIKNNQEGKKLNLVIKNEEYFEFVQNRNN

SEQ ID NO: 218 - protein, 1052 aa, Staphylococcus aureus
  REGION 1..1052: note = MISC_FEATURE - Exemplary SaCas9 polypeptide sequence
KRNYILGLDIGITSVGYGIIDYETRDVIDAGVRLFKEANVENNEGRRSKRGARRLKRRRRHRIQRVKKLLFDYNLLTDHSELSGINPYEARVKGLSQKLSEEEFSAALLHLAKRRGVHNVNEVEEDTGNELSTKEQISRNSKALEEKYVAELQLERLKKDGEVRGSINRFKTSDYVKEAKQLLKVQKAYHQLDQSFIDTYIDLLETRRTYYEGPGEGSPFGWKDIKEWYEMLMGHCTYFPEELRSVKYAYNADLYNALNDLNNLVITRDENEKLEYYEKFQIIENVFKQKKKPTLKQIAKEILVNEEDIKGYRVTSTGKPEFTNLKVYHDIKDITARKEIIENAELLDQIAKILTIYQSSEDIQEELTNLNSELTQEEIEQISNLKGYTGTHNLSLKAINLILDELWHTNDNQIAIFNRLKLVPKKVDLSQQKEIPTTLVDDFILSPVVKRSFIQSIKVINAIIKKYGLPNDIIIELAREKNSKDAQKMINEMQKRNRQTNERIEEIIRTTGKENAKYLIEKIKLHDMQEGKCLYSLEAIPLEDLLNNPFNYEVDHIIPRSVSFDNSFNNKVLVKQEENSKKGNRTPFQYLSSSDSKISYETFKKHILNLAKGKGRISKTKKEYLLEERDINRFSVQKDFINRNLVDTRYATRGLMNLLRSYFRVNNLDVKVKSINGGFTSFLRRKWKFKKERNKGYKHHAEDALIIANADFIFKEWKKLDKAKKVMENQMFEEKQAESMPEIETEQEYKEIFITPHQIKHIKDFKDYKYSHRVDKKPNRELINDTLYSTRKDDKGNTLIVNNLNGLYDKDNDKLKKLINKSPEKLLMYHHDPQTYQKLKLIMEQYGDEKNPLYKYYEETGNYLTKYSKKDNGPVIKKIKYYGNKLNAHLDITDDYPNSRNKVVKLSLKPYRFDVYLDNGVYKFVTVKNLDVIKKENYYEVNSKCYEEAKKLKKISNQAEFIASFYNNDLIKINGELYRVIGVNNDLLNRIEVNMIDITYREYLENMNDKRPPRIIKTIASKTQSIKKYSTDILGNLYEVKSKKHPQIIKKG

SEQ ID NO: 219 - protein, 1052 aa, Staphylococcus aureus
  REGION 1..1052: note = MISC_FEATURE - SaCas9n polypeptide sequence
KRNYILGLDIGITSVGYGIIDYETRDVIDAGVRLFKEANVENNEGRRSKRGARRLKRRRRHRIQRVKKLLFDYNLLTDHSELSGINPYEARVKGLSQKLSEEEFSAALLHLAKRRGVHNVNEVEEDTGNELSTKEQISRNSKALEEKYVAELQLERLKKDGEVRGSINRFKTSDYVKEAKQLLKVQKAYHQLDQSFIDTYIDLLETRRTYYEGPGEGSPFGWKDIKEWYEMLMGHCTYFPEELRSVKYAYNADLYNALNDLNNLVITRDENEKLEYYEKFQIIENVFKQKKKPTLKQIAKEILVNEEDIKGYRVTSTGKPEFTNLKVYHDIKDITARKEIIENAELLDQIAKILTIYQSSEDIQEELTNLNSELTQEEIEQISNLKGYTGTHNLSLKAINLILDELWHTNDNQIAIFNRLKLVPKKVDLSQQKEIPTTLVDDFILSPVVKRSFIQSIKVINAIIKKYGLPNDIIIELAREKNSKDAQKMINEMQKRNRQTNERIEEIIRTTGKENAKYLIEKIKLHDMQEGKCLYSLEAIPLEDLLNNPFNYEVDHIIPRSVSFDNSFNNKVLVKQEEASKKGNRTPFQYLSSSDSKISYETFKKHILNLAKGKGRISKTKKEYLLEERDINRFSVQKDFINRNLVDTRYATRGLMNLLRSYFRVNNLDVKVKSINGGFTSFLRRKWKFKKERNKGYKHHAEDALIIANADFIFKEWKKLDKAKKVMENQMFEEKQAESMPEIETEQEYKEIFITPHQIKHIKDFKDYKYSHRVDKKPNRELINDTLYSTRKDDKGNTLIVNNLNGLYDKDNDKLKKLINKSPEKLLMYHHDPQTYQKLKLIMEQYGDEKNPLYKYYEETGNYLTKYSKKDNGPVIKKIKYYGNKLNAHLDITDDYPNSRNKVVKLSLKPYRFDVYLDNGVYKFVTVKNLDVIKKENYYEVNSKCYEEAKKLKKISNQAEFIASFYNNDLIKINGELYRVIGVNNDLLNRIEVNMIDITYREYLENMNDKRPPRIIKTIASKTQSIKKYSTDILGNLYEVKSKKHPQIIKKG

SEQ ID NO: 220 - protein, 1052 aa, Staphylococcus aureus
  REGION 1..1052: note = MISC_FEATURE - SaKKH Cas9 polypeptide sequence
KRNYILGLDIGITSVGYGIIDYETRDVIDAGVRLFKEANVENNEGRRSKRGARRLKRRRRHRIQRVKKLLFDYNLLTDHSELSGINPYEARVKGLSQKLSEEEFSAALLHLAKRRGVHNVNEVEEDTGNELSTKEQISRNSKALEEKYVAELQLERLKKDGEVRGSINRFKTSDYVKEAKQLLKVQKAYHQLDQSFIDTYIDLLETRRTYYEGPGEGSPFGWKDIKEWYEMLMGHCTYFPEELRSVKYAYNADLYNALNDLNNLVITRDENEKLEYYEKFQIIENVFKQKKKPTLKQIAKEILVNEEDIKGYRVTSTGKPEFTNLKVYHDIKDITARKEIIENAELLDQIAKILTIYQSSEDIQEELTNLNSELTQEEIEQISNLKGYTGTHNLSLKAINLILDELWHTNDNQIAIFNRLKLVPKKVDLSQQKEIPTTLVDDFILSPVVKRSFIQSIKVINAIIKKYGLPNDIIIELAREKNSKDAQKMINEMQKRNRQTNERIEEIIRTTGKENAKYLIEKIKLHDMQEGKCLYSLEAIPLEDLLNNPFNYEVDHIIPRSVSFDNSFNNKVLVKQEEASKKGNRTPFQYLSSSDSKISYETFKKHILNLAKGKGRISKTKKEYLLEERDINRFSVQKDFINRNLVDTRYATRGLMNLLRSYFRVNNLDVKVKSINGGFTSFLRRKWKFKKERNKGYKHHAEDALIIANADFIFKEWKKLDKAKKVMENQMFEEKQAESMPEIETEQEYKEIFITPHQIKHIKDFKDYKYSHRVDKKPNRKLINDTLYSTRKDDKGNTLIVNNLNGLYDKDNDKLKKLINKSPEKLLMYHHDPQTYQKLKLIMEQYGDEKNPLYKYYEETGNYLTKYSKKDNGPVIKKIKYYGNKLNAHLDITDDYPNSRNKVVKLSLKPYRFDVYLDNGVYKFVTVKNLDVIKKENYYEVNSKCYEEAKKLKKISNQAEFIASFYKNDLIKINGELYRVIGVNNDLLNRIEVNMIDITYREYLENMNDKRPPHIIKTIASKTQSIKKYSTDILGNLYEVKSKKHPQIIKKG

SEQ ID NO: 221 - protein, 707 aa, synthetic construct
  REGION 1..707: note = Casphi-1 polypeptide sequence
MADTPTLFTQFLRHHLPGQRFRKDILKQAGRILANKGEDATIAFLRGKSEESPPDFQPPVKCPIIACSRPLTEWPIYQASVAIQGYVYGQSLAEFEASDPGCSKDGLLGWFDKTGVCTDYFSVQGLNLIFQNARKRYIGVQTKVTNRNEKRHKKLKRINAKRIAEGLPELTSDEPESALDETGHLIDPPGLNTNIYCYQQVSPKPLALSEVNQLPTAYAGYSTSGDDPIQPMVTKDRLSISKGQPGYIPEHQRALLSQKKHRRMRGYGLKARALLVIVRIQDDWAVIDLRSLLRNAYWRRIVQTKEPSTITKLLKLVTGDPVLDATRMVATFTYKPGIVQVRSAKCLKNKQGSKLFSERYLNETVSVTSIDLGSNNLVAVATYRLVNGNTPELLQRFTLPSHLVKDFERYKQAHDTLEDSIQKTAVASLPQGQQTEIRMWSMYGFREAQERVCQELGLADGSIPWNVMTATSTILTDLFLARGGDPKKCMFTSEPKKKKNSKQVLYKIRDRAWAKMYRTLLSKETREAWNKALWGLKRGSPDYARLSKRKEELARRCVNYTISTAEKRAQCGRTIVALEDLNIGFFHGRGKQEPGWVGLFTRKKENRWLMQALHKAFLELAHHRGYHVIEVNPAYTSQTCPVCRHCDPDNRDQHNREAFHCIGCGFRGNADLDVATHNIAMVAITGESLKRARGSVASKTPQPLAAE

SEQ ID NO: 222 - protein, 757 aa, synthetic construct
  REGION 1..757: note = Casphi-2 polypeptide sequence
MPKPAVESEFSKVLKKHFPGERFRSSYMKRGGKILAAQGEEAVVAYLQGKSEEEPPNFQPPAKCHVVTKSRDFAEWPIMKASEAIQRYIYALSTTERAACKPGKSSESHAAWFAATGVSNHGYSHVQGLNLIFDHTLGRYDGVLKKVQLRNEKARARLESINASRADEGLPEIKAEEEEVATNETGHLLQPPGINPSFYVYQTISPQAYRPRDEIVLPPEYAGYVRDPNAPIPLGVVRNRCDIQKGCPGYIPEWQREAGTAISPKTGKAVTVPGLSPKKNKRMRRYWRSEKEKAQDALLVTVRIGTDWVVIDVRGLLRNARWRTIAPKDISLNALLDLFTGDPVIDVRRNIVTFTYTLDACGTYARKWTLKGKQTKATLDKLTATQTVALVAIDLGQTNPISAGISRVTQENGALQCEPLDRFTLPDDLLKDISAYRIAWDRNEEELRARSVEALPEAQQAEVRALDGVSKETARTQLCADFGLDPKRLPWDKMSSNTTFISEALLSNSVSRDQVFFTPAPKKGAKKKAPVEVMRKDRTWARAYKPRLSVEAQKLKNEALWALKRTSPEYLKLSRRKEELCRRSINYVIEKTRRRTQCQIVIPVIEDLNVRFFHGSGKRLPGWDNFFTAKKENRWFIQGLHKAFSDLRTHRSFYVFEVRPERTSITCPKCGHCEVGNRDGEAFQCLSCGKTCNADLDVATHNLTQVALTGKTMPKREEPRDAQGTAPARKTKKASKSKAPPAEREDQTPAQEPSQTS

SEQ ID NO: 223 - protein, 766 aa, synthetic construct
  REGION 1..766: note = Casphi-3 polypeptide sequence
MEKEITELTKIRREFPNKKFSSTDMKKAGKLLKAEGPDAVRDFLNSCQEIIGDFKPPVKTNIVSISRPFEEWPVSMVGRAIQEYYFSLTKEELESVHPGTSSEDHKSFFNITGLSNYNYTSVQGLNLIFKNAKAIYDGTLVKANNKNKKLEKKFNEINHKRSLEGLPIITPDFEEPFDENGHLNNPPGINRNIYGYQGCAAKVFVPSKHKMVSLPKEYEGYNRDPNLSLAGFRNRLEIPEGEPGHVPWFQRMDIPEGQIGHVNKIQRFNFVHGKNSGKVKFSDKTGRVKRYHHSKYKDATKPYKFLEESKKVSALDSILAIITIGDDWVVFDIRGLYRNVFYRELAQKGLTAVQLLDLFTGDPVIDPKKGVVTFSYKEGVVPVFSQKIVPRFKSRDTLEKLTSQGPVALLSVDLGQNEPVAARVCSLKNINDKITLDNSCRISFLDDYKKQIKDYRDSLDELEIKIRLEAINSLETNQQVEIRDLDVFSADRAKANTVDMFDIDPNLISWDSMSDARVSTQISDLYLKNGGDESRVYFEINNKRIKRSDYNISQLVRPKLSDSTRKNLNDSIWKLKRTSEEYLKLSKRKLELSRAVVNYTIRQSKLLSGINDIVIILEDLDVKKKFNGRGIRDIGWDNFFSSRKENRWFIPAFHKAFSELSSNRGLCVIEVNPAWTSATCPDCGFCSKENRDGINFTCRKCGVSYHADIDVATLNIARVAVLGKPMSGPADRERLGDTKKPRVARSRKTMKRKDISNSTVEAMVTA

SEQ ID NO: 224 - protein, 765 aa, synthetic construct
  REGION 1..765: note = Casphi-4 polypeptide sequence
MYSLEMADLKSEPSLLAKLLRDRFPGKYWLPKYWKLAEKKRLTGGEEAACEYMADKQLDSPPPNFRPPARCVILAKSRPFEDWPVHRVASKAQSFVIGLSEQGFAALRAAPPSTADARRDWLRSHGASEDDLMALEAQLLETIMGNAISLHGGVLKKIDNANVKAAKRLSGRNEARLNKGLQELPPEQEGSAYGADGLLVNPPGLNLNIYCRKSCCPKPVKNTARFVGHYPGYLRDSDSILISGTMDRLTIIEGMPGHIPAWQREQGLVKPGGRRRRLSGSESNMRQKVDPSTGPRRSTRSGTVNRSNQRTGRNGDPLLVEIRMKEDWVLLDARGLLRNLRWRESKRGLSCDHEDLSLSGLLALFSGDPVIDPVRNEVVFLYGEGIIPVRSTKPVGTRQSKKLLERQASMGPLTLISCDLGQTNLIAGRASAISLTHGSLGVRSSVRIELDPEIIKSFERLRKDADRLETEILTAAKETLSDEQRGEVNSHEKDSPQTAKASLCRELGLHPPSLPWGQMGPSTTFIADMLISHGRDDDAFLSHGEFPTLEKRKKFDKRFCLESRPLLSSETRKALNESLWEVKRTSSEYARLSQRKKEMARRAVNFVVEISRRKTGLSNVIVNIEDLNVRIFHGGGKQAPGWDGFFRPKSENRWFIQAIHKAFSDLAAHHGIPVIESDPQRTSMTCPECGHCDSKNRNGVRFLCKGCGASMDADFDAACRNLERVALTGKPMPKPSTSCERLLSATTGKVCSDHSLSHDAIEKAS

SEQ ID NO: 225 - protein, 793 aa, synthetic construct
  REGION 1..793: note = Casphi-5 polypeptide sequence
MSSLPTPLELLKQKHADLFKGLQFSSKDNKMAGKVLKKDGEEAALAFLSERGVSRGELPNFRPPAKTLVVAQSRPFEEFPIYRVSEAIQLYVYSLSVKELETVPSGSSTKKEHQRFFQDSSVPDFGYTSVQGLNKIFGLARGIYLGVITRGENQLQKAKSKHEALNKKRRASGEAETEFDPTPYEYMTPERKLAKPPGVNHSIMCYVDISVDEFDFRNPDGIVLPSEYAGYCREINTAIEKGTVDRLGHLKGGPGYIPGHQRKESTTEGPKINFRKGRIRRSYTALYAKRDSRRVRQGKLALPSYRHHMMRLNSNAESAILAVIFFGKDWVVFDLRGLLRNVRWRNLFVDGSTPSTLLGMFGDPVIDPKRGVVAFCYKEQIVPVVSKSITKMVKAPELLNKLYLKSEDPLVLVAIDLGQTNPVGVGVYRVMNASLDYEVVTRFALESELLREIESYRQRTNAFEAQIRAETFDAMTSEEQEEITRVRAFSASKAKENVCHRFGMPVDAVDWATMGSNTIHIAKWVMRHGDPSLVEVLEYRKDNEIKLDKNGVPKKVKLTDKRIANLTSIRLRFSQETSKHYNDTMWELRRKHPVYQKLSKSKADFSRRVVNSIIRRVNHLVPRARIVFIIEDLKNLGKVFHGSGKRELGWDSYFEPKSENRWFIQVLHKAFSETGKHKGYYIIECWPNWTSCTCPKCSCCDSENRHGEVFRCLACGYTCNTDFGTAPDNLVKIATTGKGLPGPKKRCKGSSKGKNPKIARSSETGVSVTESGAPKVKKSSPTQTSQSSSQSAP

SEQ ID NO: 226 - protein, 441 aa, synthetic construct
  REGION 1..441: note = Casphi-6 polypeptide sequence
MNKIEKEKTPLAKLMNENFAGLRFPFAIIKQAGKKLLKEGELKTIEYMTGKGSIEPLPNFKPPVKCLIVAKRRDLKYFPICKASCEIQSYVYSLNYKDFMDYFSTPMTSQKQHEEFFKKSGLNIEYQNVAGLNLIFNNVKNTYNGVILKVKNRNEKLKKKAIKNNYEFEEIKTFNDDGCLINKPGINNVIYCFQSISPKILKNITHLPKEYNDYDCSVDRNIIQKYVSRLDIPESQPGHVPEWQRKLPEFNNTNNPRRRRKWYSNGRNISKGYSVDQVNQAKIEDSLLAQIKIGEDWIILDIRGLLRDLNRRELISYKNKLTIKDVLGFFSDYPIIDIKKNLVTFCYKEGVIQVVSQKSIGNKKSKQLLEKLIENKPIALVSIDLGQTNPVSVKISKLNKINNKISIESFTYRFLNEEILKEIEKYRKDYDKLELKLINEA

SEQ ID NO: 227 - protein, 772 aa, synthetic construct
  REGION 1..772: note = Casphi-7 polypeptide sequence
MSNTAVSTREHMSNKTTPPSPLSLLLRAHFPGLKFESQDYKIAGKKLRDGGPEAVISYLTGKGQAKLKDVKPPAKAFVIAQSRPFIEWDLVRVSRQIQEKIFGIPATKGRPKQDGLSETAFNEAVASLEVDGKSKLNEETRAAFYEVLGLDAPSLHAQAQNALIKSAISIREGVLKKVENRNEKNLSKTKRRKEAGEEATFVEEKAHDERGYLIHPPGVNQTIPGYQAVVIKSCPSDFIGLPSGCLAKESAEALTDYLPHDRMTIPKGQPGYVPEWQHPLLNRRKNRRRRDWYSASLNKPKATCSKRSGTPNRKNSRTDQIQSGRFKGAIPVLMRFQDEWVIIDIRGLLRNARYRKLLKEKSTIPDLLSLFTGDPSIDMRQGVCTFIYKAGQACSAKMVKTKNAPEILSELTKSGPVVLVSIDLGQTNPIAAKVSRVTQLSDGQLSHETLLRELLSNDSSDGKEIARYRVASDRLRDKLANLAVERLSPEHKSEILRAKNDTPALCKARVCAALGLNPEMIAWDKMTPYTEFLATAYLEKGGDRKVATLKPKNRPEMLRRDIKFKGTEGVRIEVSPEAAEAYREAQWDLQRTSPEYLRLSTWKQELTKRILNQLRHKAAKSSQCEVVVMAFEDLNIKMMHGNGKWADGGWDAFFIKKRENRWFMQAFHKSLTELGAHKGVPTIEVTPHRTSITCTKCGHCDKANRDGERFACQKCGFVAHADLEIATDNIERVALTGKPMPKPESERSGDAKKSVGARKAAFKPEEDAEAAE

SEQ ID NO: 228 - protein, 717 aa, synthetic construct
  REGION 1..717: note = Casphi-8 polypeptide sequence
MIKPTVSQFLTPGFKLIRNHSRTAGLKLKNEGEEACKKFVRENEIPKDECPNFQGGPAIANIIAKSREFTEWEIYQSSLAIQEVIFTLPKDKLPEPILKEEWRAQWLSEHGLDTVPYKEAAGLNLIIKNAVNTYKGVQVKVDNKNKNNLAKINRKNEIAKLNGEQEISFEEIKAFDDKGYLLQKPSPNKSIYCYQSVSPKPFITSKYHNVNLPEEYIGYYRKSNEPIVSPYQFDRLRIPIGEPGYVPKWQYTFLSKKENKRRKLSKRIKNVSPILGIICIKKDWCVFDMRGLLRTNHWKKYHKPTDSINDLFDYFTGDPVIDTKANVVRFRYKMENGIVNYKPVREKKGKELLENICDQNGSCKLATVDVGQNNPVAIGLFELKKVNGELTKTLISRHPTPIDFCNKITAYRERYDKLESSIKLDAIKQLTSEQKIEVDNYNNNFTPQNTKQIVCSKLNINPNDLPWDKMISGTHFISEKAQVSNKSEIYFTSTDKGKTKDVMKSDYKWFQDYKPKLSKEVRDALSDIEWRLRRESLEFNKLSKSREQDARQLANWISSMCDVIGIENLVKKNNFFGGSGKREPGWDNFYKPKKENRWWINAIHKALTELSQNKGKRVILLPAMRTSITCPKCKYCDSKNRNGEKFNCLKCGIELNADIDVATENLATVAITAQSMPKPTCERSGDAKKPVRARKAKAPEFHDKLAPSYTVVLREAV

SEQ ID NO: 229 - protein, 793 aa, synthetic construct
  REGION 1..793: note = Casphi-9 polypeptide sequence
MRSSREIGDKILMRQPAEKTAFQVFRQEVIGTQKLSGGDAKTAGRLYKQGKMEAAREWLLKGARDDVPPNFQPPAKCLVVAVSHPFEEWDISKTNHDVQAYIYAQPLQAEGHLNGLSEKWEDTSADQHKLWFEKTGVPDRGLPVQAINKIAKAAVNRAFGVVRKVENRNEKRRSRDNRIAEHNRENGLTEVVREAPEVATNADGFLLHPPGIDPSILSYASVSPVPYNSSKHSFVRLPEEYQAYNVEPDAPIPQFVVEDRFAIPPGQPGYVPEWQRLKCSTNKHRRMRQWSNQDYKPKAGRRAKPLEFQAHLTRERAKGALLVVMRIKEDWVVFDVRGLLRNVEWRKVLSEEAREKLTLKGLLDLFTGDPVIDTKRGIVTFLYKAEITKILSKRTVKTKNARDLLLRLTEPGEDGLRREVGLVAVDLGQTHPIAAAIYRIGRTSAGALESTVLHRQGLREDQKEKLKEYRKRHTALDSRLRKEAFETLSVEQQKEIVTVSGSGAQITKDKVCNYLGVDPSTLPWEKMGSYTHFISDDFLRRGGDPNIVHFDRQPKKGKVSKKSQRIKRSDSQWVGRMRPRLSQETAKARMEADWAAQNENEEYKRLARSKQELARWCVNTLLQNTRCITQCDEIVVVIEDLNVKSLHGKGAREPGWDNFFTPKTENRWFIQILHKTFSELPKHRGEHVIEGCPLRTSITCPACSYCDKNSRNGEKFVCVACGATFHADFEVATYNLVRLATTGMPMPKSLERQGGGEKAGGARKARKKAKQVEKIVVQANANVTMNGASLHSP

SEQ ID NO: 230 - protein, 812 aa, synthetic construct
  REGION 1..812: note = Casphi-10 polypeptide sequence
MDMLDTETNYATETPAQQQDYSPKPPKKAQRAPKGFSKKARPEKKPPKPITLFTQKHFSGVRFLKRVIRDASKILKLSESRTITFLEQAIERDGSAPPDVTPPVHNTIMAVTRPFEEWPEVILSKALQKHCYALTKKIKIKTWPKKGPGKKCLAAWSARTKIPLIPGQVQATNGLFDRIGSIYDGVEKKVTNRNANKKLEYDEAIKEGRNPAVPEYETAYNIDGTLINKPGYNPNLYITQSRTPRLITEADRPLVEKILWQMVEKKTQSRNQARRARLEKAAHLQGLPVPKFVPEKVDRSQKIEIRIIDPLDKIEPYMPQDRMAIKASQDGHVPYWQRPFLSKRRNRRVRAGWGKQVSSIQAWLTGALLVIVRLGNEAFLADIRGALRNAQWRKLLKPDATYQSLFNLFTGDPVVNTRTNHLTMAYREGVVNIVKSRSFKGRQTREHLLTLLGQGKTVAGVSFDLGQKHAAGLLAAHFGLGEDGNPVFTPIQACFLPQRYLDSLTNYRNRYDALTLDMRRQSLLALTPAQQQEFADAQRDPGGQAKRACCLKLNLNPDEIRWDLVSGISTMISDLYIERGGDPRDVHQQVETKPKGKRKSEIRILKIRDGKWAYDFRPKIADETRKAQREQLWKLQKASSEFERLSRYKINIARAIANWALQWGRELSGCDIVIPVLEDLNVGSKFFDGKGKWLLGWDNRFTPKKENRWFIKVLHKAVAELAPHRGVPVYEVMPHRTSMTCPACHYCHPTNREGDRFECQSCHVVKNTDRDVAPYNILRVAVEGKTLDRWQAEKKPQAEPDRPMILIDNQES

SEQ ID NO: 231 - protein, 84 aa, synthetic construct
  REGION 1..84: note = synthetic polypeptide sequence
MTNLSDIIEKETGKQLVIQESILMLPEEVEEVIGNKPESDILVHTAYDESTDENVMLLTSDAPEYKPWALVIQDSNGENKIKML

SEQ ID NO: 232 - protein, 1129 aa, Alicyclobacillus acidoterrestris
  REGION 1..1129: note = MISC_FEATURE - Cas12b/C2c1; sp|T0D7A2|C2C1_ALIAG CRISPR-associated endonuclease C2c1 OS = Alicyclobacillus acido-terrestris (strain ATCC 49025 /DSM 3922/ CIP 106132 / NCIMB 13137/GD3B) GN=c2c1 PE=1 SV=1; Cas12b/C2c1 polypeptide sequence
MAVKSIKVKLRLDDMPEIRAGLWKLHKEVNAGVRYYTEWLSLLRQENLYRRSPNGDGEQECDKTAEECKAELLERLRARQVENGHRGPAGSDDELLQLARQLYELLVPQAIGAKGDAQQIARKFLSPLADKDAVGGLGIAKAGNKPRWVRMREAGEPGWEEEKEKAETRKSADRTADVLRALADFGLKPLMRVYTDSEMSSVEWKPLRKGQAVRTWDRDMFQQAIERMMSWESWNQRVGQEYAKLVEQKNRFEQKNFVGQEHLVHLVNQLQQDMKEASPGLESKEQTAHYVTGRALRGSDKVFEKWGKLAPDAPFDLYDAEIKNVQRRNTRRFGSHDLFAKLAEPEYQALWREDASFLTRYAVYNSILRKLNHAKMFATFTLPDATAHPIWTRFDKLGGNLHQYTFLFNEFGERRHAIRFHKLLKVENGVAREVDDVTVPISMSEQLDNLLPRDPNEPIALYFRDYGAEQHFTGEFGGAKIQCRRDQLAHMHRRRGARDVYLNVSVRVQSQSEARGERRPPYAAVFRLVGDNHRAFVHFDKLSDYLAEHPDDGKLGSEGLLSGLRVMSVDLGLRTSASISVFRVARKDELKPNSKGRVPFFFPIKGNDNLVAVHERSQLLKLPGETESKDLRAIREERQRTLRQLRTQLAYLRLLVRCGSEDVGRRERSWAKLIEQPVDAANHMTPDWREAFENELQKLKSLHGICSDKEWMDAVYESVRRVWRHMGKQVRDWRKDVRSGERPKIRGYAKDVVGGNSIEQIEYLERQYKFLKSWSFFGKVSGQVIRAEKGSRFAITLREHIDHAKEDRLKKLADRIIMEALGYVYALDERGKGKWVAKYPPCQLILLEELSEYQFNNDRPPSENNQLMQWSHRGVFQELINQAQVHDLLVGTMYAAFSSRFDARTGAPGIRCRRVPARCTQEHNPEPFPWWLNKFVVEHTLDACPLRADDLIPTGEGEIFVSPFSAEEGDFHQIHADLNAAQNLQQRLWSDFDISQIRLRCDWGEVDGELVLIPRLTGKRTADSYSNKVFYTNTGVTYYERERGKKRRKVFAQEKLSEEEAELLVEADEAREKSVVLMRDPSGIINRGNWTRQKEFWSMVNQRIEGYLVKQIRSRVPLQDSACENTGDI

SEQ ID NO: 233 - protein, 1368 aa, Mus musculus
  REGION 1..1368: note = MISC_FEATURE - high fidelity Cas9 polypeptide sequence
MDKKYSIGLAIGTNSVGWAVITDEYKVPSKKFKVLGNTDRHSIKKNLIGALLFDSGETAEATRLKRTARRRYTRRKNRICYLQEIFSNEMAKVDDSFFHRLEESFLVEEDKKHERHPIFGNIVDEVAYHEKYPTIYHLRKKLVDSTDKADLRLIYLALAHMIKFRGHFLIEGDLNPDNSDVDKLFIQLVQTYNQLFEENPINASGVDAKAILSARLSKSRRLENLIAQLPGEKKNGLFGNLIALSLGLTPNFKSNFDLAEDAKLQLSKDTYDDDLDNLLAQIGDQYADLFLAAKNLSDAILLSDILRVNTEITKAPLSASMIKRYDEHHQDLTLLKALVRQQLPEKYKEIFFDQSKNGYAGYIDGGASQEEFYKFIKPILEKMDGTEELLVKLNREDLLRKQRTFDNGSIPHQIHLGELHAILRRQEDFYPFLKDNREKIEKILTFRIPYYVGPLARGNSRFAWMTRKSEETITPWNFEEVVDKGASAQSFIERMTAFDKNLPNEKVLPKHSLLYEYFTVYNELTKVKYVTEGMRKPAFLSGEQKKAIVDLLFKTNRKVTVKQLKEDYFKKIECFDSVEISGVEDRFNASLGTYHDLLKIIKDKDFLDNEENEDILEDIVLTLTLFEDREMIEERLKTYAHLFDDKVMKQLKRRRYTGWGALSRKLINGIRDKQSGKTILDFLKSDGFANRNFMALIHDDSLTFKEDIQKAQVSGQGDSLHEHIANLAGSPAIKKGILQTVKVVDELVKVMGRHKPENIVIEMARENQTTQKGQKNSRERMKRIEEGIKELGSQILKEHPVENTQLQNEKLYLYYLQNGRDMYVDQELDINRLSDYDVDHIVPQSFLKDDSIDNKVLTRSDKNRGKSDNVPSEEVVKKMKNYWRQLLNAKLITQRKFDNLTKAERGGLSELDKAGFIKRQLVETRAITKHVAQILDSRMNTKYDENDKLIREVKVITLKSKLVSDFRKDFQFYKVREINNYHHAHDAYLNAVVGTALIKKYPKLESEFVYGDYKVYDVRKMIAKSEQEIGKATAKYFFYSNIMNFFKTEITLANGEIRKRPLIETNGETGEIVWDKGRDFATVRKVLSMPQVNIVKKTEVQTGGFSKESILPKRNSDKLIARKKDWDPKKYGGFDSPTVAYSVLVVAKVEKGKSKKLKSVKELLGITIMERSSFEKNPIDFLEAKGYKEVKKDLIIKLPKYSLFELENGRKRMLASAGELQKGNELALPSKYVNFLYLASHYEKLKGSPEDNEQKQLFVEQHKHYLDEIIEQISEFSKRVILADANLDKVLSAYNKHRDKPIREQAENIIHLFTLTNLGAPAAFKYFDTTIDRKRYTSTKEVLDATLIHQSITGLYETRIDLSQLGGD

SEQ ID NO: 234 - protein, 1368 aa, Streptococcus pyogenes
  REGION 1..1368: note = MISC_FEATURE - PAM-binding SpEQR Cas9 polypeptide sequence
MDKKYSIGLAIGTNSVGWAVITDEYKVPSKKFKVLGNTDRHSIKKNLIGALLFDSGETAEATRLKRTARRRYTRRKNRICYLQEIFSNEMAKVDDSFFHRLEESVLVEEDKKHERHPIFGNIVDEVAYHEKYPTIYHLRKKLVDSTDKADLRLIYLALAHMIKFRGHFLIEGDLNPDNSDVDKLFIQLVQTYNQLFEENPINASGVDAKAILSARLSKSRRLENLIAQLPGEKKNGLFGNLIALSLGLTPNFKSNFDLAEDAKLQLSKDTYDDDLDNLLAQIGDQYADLFLAAKNLSDAILLSDILRVNTEITKAPLSASMIKRYDEHHQDLTLLKALVRQQLPEKYKEIFFDQSKNGYAGYIDGGASQEEFYKFIKPILEKMDGTEELLVKLNREDLLRKQRTFDNGSIPHQIHLGELHAILRRQEDFYPFLKDNREKIEKILTFRIPYYVGPLARGNSRFAWMTRKSEETITPWNFEEVVDKGASAQSFIERMTNFDKNLPNEKVLPKHSLLYEYFTVYNELTKVKYVTEGMRKPAFLSGEQKKAIVDLLFKTNRKVTVKQLKEDYFKKIECFDSVEISGVEDRFNASLGTYHDLLKIIKDKDFLDNEENEDILEDIVLTLTLFEDREMIEERLKTYAHLFDDKVMKQLKRRRYTGWGRLSRKLINGIRDKQSGKTILDFLKSDGFANRNFMQLIHDDSLTFKEDIQKAQVSGQGDSLHEHIANLAGSPAIKKGILQTVKVVDELVKVMGRHKPENIVIEMARENQTTQKGQKNSRERMKRIEEGIKELGSQILKEHPVENTQLQNEKLYLYYLQNGRDMYVDQELDINRLSDYDVDHIVPQSFLKDDSIDNKVLTRSDKNRGKSDNVPSEEVVKKMKNYWRQLLNAKLITQRKFDNLTKAERGGLSELDKAGFIKRQLVETRQITKHVAQILDSRMNTKYDENDKLIREVKVITLKSKLVSDFRKDFQFYKVREINNYHHAHDAYLNAVVGTALIKKYPKLESEFVYGDYKVYDVRKMIAKSEQEIGKATAKYFFYSNIMNFFKTEITLANGEIRKRPLIETNGETGEIVWDKGRDFATVRKVLSMPQVNIVKKTEVQTGGFSKESILPKRNSDKLIARKKDWDPKKYGGFESPTVAYSVLVVAKVEKGKSKKLKSVKELLGITIMERSSFEKNPIDFLEAKGYKEVKKDLIIKLPKYSLFELENGRKRMLASAGELQKGNELALPSKYVNFLYLASHYEKLKGSPEDNEQKQLFVEQHKHYLDEIIEQISEFSKRVILADANLDKVLSAYNKHRDKPIREQAENIIHLFTLTNLGAPAAFKYFDTTIDRKQYRSTKEVLDATLIHQSITGLYETRIDLSQLGGD

SEQ ID NO: 235 - protein, 1368 aa, Streptococcus pyogenes
  REGION 1..1368: note = MISC_FEATURE - PAM-binding SpVQR Cas9 polypeptide sequence
MDKKYSIGLAIGTNSVGWAVITDEYKVPSKKFKVLGNTDRHSIKKNLIGALLFDSGETAEATRLKRTARRRYTRRKNRICYLQEIFSNEMAKVDDSFFHRLEESFLVEEDKKHERHPIFGNIVDEVAYHEKYPTIYHLRKKLVDSTDKADLRLIYLALAHMIKFRGHFLIEGDLNPDNSDVDKLFIQLVQTYNQLFEENPINASGVDAKAILSARLSKSRRLENLIAQLPGEKKNGLFGNLIALSLGLTPNFKSNFDLAEDAKLQLSKDTYDDDLDNLLAQIGDQYADLFLAAKNLSDAILLSDILRVNTEITKAPLSASMIKRYDEHHQDLTLLKALVRQQLPEKYKEIFFDQSKNGYAGYIDGGASQEEFYKFIKPILEKMDGTEELLVKLNREDLLRKQRTFDNGSIPHQIHLGELHAILRRQEDFYPFLKDNREKIEKILTFRIPYYVGPLARGNSRFAWMTRKSEETITPWNFEEVVDKGASAQSFIERMTNFDKNLPNEKVLPKHSLLYEYFTVYNELTKVKYVTEGMRKPAFLSGEQKKAIVDLLFKTNRKVTVKQLKEDYFKKIECFDSVEISGVEDRFNASLGTYHDLLKIIKDKDFLDNEENEDILEDIVLTLTLFEDREMIEERLKTYAHLFDDKVMKQLKRRRYTGWGRLSRKLINGIRDKQSGKTILDFLKSDGFANRNFMQLIHDDSLTFKEDIQKAQVSGQGDSLHEHIANLAGSPAIKKGILQTVKVVDELVKVMGRHKPENIVIEMARENQTTQKGQKNSRERMKRIEEGIKELGSQILKEHPVENTQLQNEKLYLYYLQNGRDMYVDQELDINRLSDYDVDHIVPQSFLKDDSIDNKVLTRSDKNRGKSDNVPSEEVVKKMKNYWRQLLNAKLITQRKFDNLTKAERGGLSELDKAGFIKRQLVETRQITKHVAQILDSRMNTKYDENDKLIREVKVITLKSKLVSDFRKDFQFYKVREINNYHHAHDAYLNAVVGTALIKKYPKLESEFVYGDYKVYDVRKMIAKSEQEIGKATAKYFFYSNIMNFFKTEITLANGEIRKRPLIETNGETGEIVWDKGRDFATVRKVLSMPQVNIVKKTEVQTGGFSKESILPKRNSDKLIARKKDWDPKKYGGFVSPTVAYSVLVVAKVEKGKSKKLKSVKELLGITIMERSSFEKNPIDFLEAKGYKEVKKDLIIKLPKYSLFELENGRKRMLASAGELQKGNELALPSKYVNFLYLASHYEKLKGSPEDNEQKQLFVEQHKHYLDEIIEQISEFSKRVILADANLDKVLSAYNKHRDKPIREQAENIIHLFTLTNLGAPAAFKYFDTTIDRKQYRSTKEVLDATLIHQSITGLYETRIDLSQLGGD

SEQ ID NO: 236 - protein, 1368 aa, Streptococcus pyogenes
  REGION 1..1368: note = MISC_FEATURE - SpVQR Cas9 polypeptide sequence
MDKKYSIGLAIGTNSVGWAVITDEYKVPSKKFKVLGNTDRHSIKKNLIGALLFDSGETAEATRLKRTARRRYTRRKNRICYLQEIFSNEMAKVDDSFFHRLEESFLVEEDKKHERHPIFGNIVDEVAYHEKYPTIYHLRKKLVDSTDKADLRLIYLALAHMIKFRGHFLIEGDLNPDNSDVDKLFIQLVQTYNQLFEENPINASGVDAKAILSARLSKSRRLENLIAQLPGEKKNGLFGNLIALSLGLTPNFKSNFDLAEDAKLQLSKDTYDDDLDNLLAQIGDQYADLFLAAKNLSDAILLSDILRVNTEITKAPLSASMIKRYDEHHQDLTLLKALVRQQLPEKYKEIFFDQSKNGYAGYIDGGASQEEFYKFIKPILEKMDGTEELLVKLNREDLLRKQRTFDNGSIPHQIHLGELHAILRRQEDFYPFLKDNREKIEKILTFRIPYYVGPLARGNSRFAWMTRKSEETITPWNFEEVVDKGASAQSFIERMTNFDKNLPNEKVLPKHSLLYEYFTVYNELTKVKYVTEGMRKPAFLSGEQKKAIVDLLFKTNRKVTVKQLKEDYFKKIECFDSVEISGVEDRFNASLGTYHDLLKIIKDKDFLDNEENEDILEDIVLTLTLFEDREMIEERLKTYAHLFDDKVMKQLKRRRYTGWGRLSRKLINGIRDKQSGKTILDFLKSDGFANRNFMQLIHDDSLTFKEDIQKAQVSGQGDSLHEHIANLAGSPAIKKGILQTVKVVDELVKVMGRHKPENIVIEMARENQTTQKGQKNSRERMKRIEEGIKELGSQILKEHPVENTQLQNEKLYLYYLQNGRDMYVDQELDINRLSDYDVDHIVPQSFLKDDSIDNKVLTRSDKNRGKSDNVPSEEVVKKMKNYWRQLLNAKLITQRKFDNLTKAERGGLSELDKAGFIKRQLVETRQITKHVAQILDSRMNTKYDENDKLIREVKVITLKSKLVSDFRKDFQFYKVREINNYHHAHDAYLNAVVGTALIKKYPKLESEFVYGDYKVYDVRKMIAKSEQEIGKATAKYFFYSNIMNFFKTEITLANGEIRKRPLIETNGETGEIVWDKGRDFATVRKVLSMPQVNIVKKTEVQTGGFSKESILPKRNSDKLIARKKDWDPKKYGGFVSPTVAYSVLVVAKVEKGKSKKLKSVKELLGITIMERSSFEKNPIDFLEAKGYKEVKKDLIIKLPKYSLFELENGRKRMLASARELQKGNELALPSKYVNFLYLASHYEKLKGSPEDNEQKQLFVEQHKHYLDEIIEQISEFSKRVILADANLDKVLSAYNKHRDKPIREQAENIIHLFTLTNLGAPAAFKYFDTTIDRKEYRSTKEVLDATLIHQSITGLYETRIDLSQLGGD

SEQ ID NO: 237 - protein, 1359 aa, Streptococcus macacae
  REGION 1..1359: note = MISC_FEATURE - SpyMacCas9 polypeptide sequence
MDKKYSIGLDIGTNSVGWAVITDDYKVPSKKFKVLGNTDRHSIKKNLIGALLFGSGETAEATRLKRTARRRYTRRKNRICYLQEIFSNEMAKVDDSFFHRLEESFLVEEDKKHERHPIFGNIVDEVAYHEKYPTIYHLRKKLADSTDKADLRLIYLALAHMIKFRGHFLIEGDLNPDNSDVDKLFIQLVQIYNQLFEENPINASRVDAKAILSARLSKSRRLENLIAQLPGEKRNGLFGNLIALSLGLTPNFKSNFDLAEDAKLQLSKDTYDDDLDNLLAQIGDQYADLFLAAKNLSDAILLSDILRVNSEITKAPLSASMIKRYDEHHQDLTLLKALVRQQLPEKYKEIFFDQSKNGYAGYIDGGASQEEFYKFIKPILEKMDGTEELLVKLNREDLLRKQRTFDNGSIPHQIHLGELHAILRRQEDFYPFLKDNREKIEKILTFRIPYYVGPLARGNSRFAWMTRKSEETITPWNFEEVVDKGASAQSFIERMTNFDKNLPNEKVLPKHSLLYEYFTVYNELTKVKYVTEGMRKPAFLSGEQKKAIVDLLFKTNRKVTVKQLKEDYFKKIECFDSVEISGVEDRFNASLGAYHDLLKIIKDKDFLDNEENEDILEDIVLTLTLFEDRGMIEERLKTYAHLFDDKVMKQLKRRRYTGWGRLSRKLINGIRDKQSGKTILDFLKSDGFANRNFMQLIHDDSLTFKEDIQKAQVSGQGHSLHEQIANLAGSPAIKKGILQTVKIVDELVKVMGHKPENIVIEMARENQTTQKGQKNSRERMKRIEEGIKELGSQILKEHPVENTQLQNEKLYLYYLQNGRDMYVDQELDINRLSDYDVDHIVPQSFIKDDSIDNKVLTRSDKNRGKSDNVPSEEVVKKMKNYWRQLLNAKLITQRKFDNLTKAERGGLSELDKAGFIKRQLVETRQITKHVAQILDSRMNTKYDENDKLIREVKVITLKSKLVSDFRKDFQFYKVREINNYHHAHDAYLNAVVGTALIKKYPKLESEFVYGDYKVYDVRKMIAKSEQEIGKATAKYFFYSNIMNFFKTEITLANGEIRKRPLIETNGETGEIVWDKGRDFATVRKVLSMPQVNIVKKTEIQTVGQNGGLFDDNPKSPLEVTPSKLVPLKKELNPKKYGGYQKPTTAYPVLLITDTKQLIPISVMNKKQFEQNPVKFLRDRGYQQVGKNDFIKLPKYTLVDIGDGIKRLWASSKEIHKGNQLVVSKKSQILLYHAHHLDSDLSNDYLQNHNQQFDVLFNEIISFSKKCKLGKEHIQKIENVYSNKKNSASIEELAESFIKLLGFTQLGATSPFNFLGVKLNQKQYKGKKDYILPCTEGTLIRQSITGLYETRVDLSKIGED

SEQ ID NO: 238 - protein, 1410 aa, synthetic construct
  REGION 1..1410: note = CP5 polypeptide sequence
  REGION 1..341: note = MISC_FEATURE - Sequence derived from Cas9
  REGION 342..362: note = MISC_FEATURE - Linker sequence
  REGION 363..1388: note = MISC_FEATURE - Sequence derived from Cas9
  REGION 1389..1410: note = MISC_FEATURE - Bipartite nuclear localization sequence
EIGKATAKYFFYSNIMNFFKTEITLANGEIRKRPLIETNGETGEIVWDKGRDFATVRKVLSMPQVNIVKKTEVQTGGFSKESILPKRNSDKLIARKKDWDPKKYGGFMQPTVAYSVLVVAKVEKGKSKKLKSVKELLGITIMERSSFEKNPIDFLEAKGYKEVKKDLIIKLPKYSLFELENGRKRMLASAKFLQKGNELALPSKYVNFLYLASHYEKLKGSPEDNEQKQLFVEQHKHYLDEIIEQISEFSKRVILADANLDKVLSAYNKHRDKPIREQAENIIHLFTLTNLGAPRAFKYFDTTIARKEYRSTKEVLDATLIHQSITGLYETRIDLSQLGGDGGSGGSGGSGGSGGSGGSGGMDKKYSIGLAIGTNSVGWAVITDEYKVPSKKFKVLGNTDRHSIKKNLIGALLFDSGETAEATRLKRTARRRYTRRKNRICYLQEIFSNEMAKVDDSFFHRLEESFLVEEDKKHERHPIFGNIVDEVAYHEKYPTIYHLRKKLVDSTDKADLRLIYLALAHMIKFRGHFLIEGDLNPDNSDVDKLFIQLVQTYNQLFEENPINASGVDAKAILSARLSKSRRLENLIAQLPGEKKNGLFGNLIALSLGLTPNFKSNFDLAEDAKLQLSKDTYDDDLDNLLAQIGDQYADLFLAAKNLSDAILLSDILRVNTEITKAPLSASMIKRYDEHHQDLTLLKALVRQQLPEKYKEIFFDQSKNGYAGYIDGGASQEEFYKFIKPILEKMDGTEELLVKLNREDLLRKQRTFDNGSIPHQIHLGELHAILRRQEDFYPFLKDNREKIEKILTFRIPYYVGPLARGNSRFAWMTRKSEETITPWNFEEVVDKGASAQSFIERMTNFDKNLPNEKVLPKHSLLYEYFTVYNELTKVKYVTEGMRKPAFLSGEQKKAIVDLLFKTNRKVTVKQLKEDYFKKIECFDSVEISGVEDRFNASLGTYHDLLKIIKDKDFLDNEENEDILEDIVLTLTLFEDREMIEERLKTYAHLFDDKVMKQLKRRRYTGWGRLSRKLINGIRDKQSGKTILDFLKSDGFANRNFMQLIHDDSLTFKEDIQKAQVSGQGDSLHEHIANLAGSPAIKKGILQTVKVVDELVKVMGRHKPENIVIEMARENQTTQKGQKNSRERMKRIEEGIKELGSQILKEHPVENTQLQNEKLYLYYLQNGRDMYVDQELDINRLSDYDVDHIVPQSFLKDDSIDNKVLTRSDKNRGKSDNVPSEEVVKKMKNYWRQLLNAKLITQRKFDNLTKAERGGLSELDKAGFIKRQLVETRQITKHVAQILDSRMNTKYDENDKLIREVKVITLKSKLVSDFRKDFQFYKVREINNYHHAHDAYLNAVVGTALIKKYPKLESEFVYGDYKVYDVRKMIAKSEQEGADKRTADGSEFESPKKKRKV

SEQ ID NO: 239 - protein, 1302 aa, synthetic construct
  REGION 1..1302: note = Cas12c1 polypeptide sequence
MQTKKTHLHLISAKASRKYRRTIACLSDTAKKDLERRKQSGAADPAQELSCLKTIKFKLEVPEGSKLPSFDRISQIYNALETIEKGSLSYLLFALILSGFRIFPNSSAAKTFASSSCYKNDQFASQIKEIFGEMVKNFIPSELESILKKGRRKNNKDWTEENIKRVLNSEFGRKNSEGSSALFDSFLSKFSQELFRKFDSWNEVNKKYLEAAELLDSMLASYGPFDSVCKMIGDSDSRNSLPDKSTIAFTNNAEITVDIESSVMPYMAIAALLREYRQSKSKAAPVAYVQSHLTTTNGNGLSWFFKFGLDLIRKAPVSSKQSTSDGSKSLQELFSVPDDKLDGLKFIKEACEALPEASLLCGEKGELLGYQDFRTSFAGHIDSWVANYVNRLFELIELVNQLPESIKLPSILTQKNHNLVASLGLQEAEVSHSLELFEGLVKNVRQTLKKLAGIDISSSPNEQDIKEFYAFSDVLNRLGSIRNQIENAVQTAKKDKIDLESAIEWKEWKKLKKLPKLNGLGGGVPKQQELLDKALESVKQIRHYQRIDFERVIQWAVNEHCLETVPKFLVDAEKKKINKESSTDFAAKENAVRFLLEGIGAAARGKTDSVSKAAYNWFVVNNFLAKKDLNRYFINCQGCIYKPPYSKRRSLAFALRSDNKDTIEVVWEKFETFYKEISKEIEKFNIFSQEFQTFLHLENLRMKLLLRRIQKPIPAEIAFFSLPQEYYDSLPPNVAFLALNQEITPSEYITQFNLYSSFLNGNLILLRRSRSYLRAKFSWVGNSKLIYAAKEARLWKIPNAYWKSDEWKMILDSNVLVFDKAGNVLPAPTLKKVCEREGDLRLFYPLLRQLPHDWCYRNPFVKSVGREKNVIEVNKEGEPKVASALPGSLFRLIGPAPFKSLLDDCFFNPLDKDLRECMLIVDQEISQKVEAQKVEASLESCTYSIAVPIRYHLEEPKVSNQFENVLAIDQGEAGLAYAVFSLKSIGEAETKPIAVGTIRIPSIRRLIHSVSTYRKKKQRLQNFKQNYDSTAFIMRENVTGDVCAKIVGLMKEFNAFPVLEYDVKNLESGSRQLSAVYKAVNSHFLYFKEPGRDALRKQLWYGGDSWTIDGIEIVTRERKEDGKEGVEKIVPLKVFPGRSVSARFTSKTCSCCGRNVFDWLFTEKKAKTNKKFNVNSKGELTTADGVIQLFEADRSKGPKFYARRKERTPLTKPIAKGSYSLEEIERRVRTNLRRAPKSKQSRDTSQSQYFCVYKDCALHFSGMQADENAAINIGRRFLTALRKNRRSDFPSNVKISDRLLDN

SEQ ID NO: 240 - protein, 1218 aa, synthetic construct
  REGION 1..1218: note = Cas12c2 polypeptide sequence
MTKHSIPLHAFRNSGADARKWKGRIALLAKRGKETMRTLQFPLEMSEPEAAAINTTPFAVAYNAIEGTGKGTLFDYWAKLHLAGFRFFPSGGAATIFRQQAVFEDASWNAAFCQQSGKDWPWLVPSKLYERFTKAPREVAKKDGSKKSIEFTQENVANESHVSLVGASITDKTPEDQKEFFLKMAGALAEKFDSWKSANEDRIVAMKVIDEFLKSEGLHLPSLENIAVKCSVETKPDNATVAWHDAPMSGVQNLAIGVFATCASRIDNIYDLNGGKLSKLIQESATTPNVTALSWLFGKGLEYFRTTDIDTIMQDFNIPASAKESIKPLVESAQAIPTMTVLGKKNYAPFRPNFGGKIDSWIANYASRLMLLNDILEQIEPGFELPQALLDNETLMSGIDMTGDELKELIEAVYAWVDAAKQGLATLLGRGGNVDDAVQTFEQFSAMMDTLNGTLNTISARYVRAVEMAGKDEARLEKLIECKFDIPKWCKSVPKLVGISGGLPKVEEEIKVMNAAFKDVRARMFVRFEEIAAYVASKGAGMDVYDALEKRELEQIKKLKSAVPERAHIQAYRAVLHRIGRAVQNCSEKTKQLFSSKVIEMGVFKNPSHLNNFIFNQKGAIYRSPFDRSRHAPYQLHADKLLKNDWLELLAEISATLMASESTEQMEDALRLERTRLQLQLSGLPDWEYPASLAKPDIEVEIQTALKMQLAKDTVTSDVLQRAFNLYSSVLSGLTFKLLRRSFSLKMRFSVADTTQLIYVPKVCDWAIPKQYLQAEGEIGIAARVVTESSPAKMVTEVEMKEPKALGHFMQQAPHDWYFDASLGGTQVAGRIVEKGKEVGKERKLVGYRMRGNSAYKTVLDKSLVGNTELSQCSMIIEIPYTQTVDADFRAQVQAGLPKVSINLPVKETITASNKDEQMLFDRFVAIDLGERGLGYAVFDAKTLELQESGHRPIKAITNLLNRTHHYEQRPNQRQKFQAKFNVNLSELRENTVGDVCHQINRICAYYNAFPVLEYMVPDRLDKQLKSVYESVTNRYIWSSTDAHKSARVQFWLGGETWEHPYLKSAKDKKPLVLSPGRGASGKGTSQTCSCCGRNPFDLIKDMKPRAKIAVVDGKAKLENSELKLFERNLESKDDMLARRHRNERAGMEQPLTPGNYTVDEIKALLRANLRRAPKNRRTKDTTVSEYHCVFSDCGKTMHADENAAVNIGGKFIADIEK

SEQ ID NO: 241 - protein, 1252 aa, Oleiphilus sp.
  REGION 1..1252: note = MISC_FEATURE - OspCas12c polypeptide sequence
MTKLRHRQKKLTHDWAGSKKREVLGSNGKLQNPLLMPVKKGQVTEFRKAFSAYARATKGEMTDGRKNMFTHSFEPFKTKPSLHQCELADKAYQSLHSYLPGSLAHFLLSAHALGFRIFSKSGEATAFQASSKIEAYESKLASELACVDLSIQNLTISTLFNALTTSVRGKGEETSADPLIARFYTLLTGKPLSRDTQGPERDLAEVISRKIASSFGTWKEMTANPLQSLQFFEEELHALDANVSLSPAFDVLIKMNDLQGDLKNRTIVFDPDAPVFEYNAEDPADIIIKLTARYAKEAVIKNQNVGNYVKNAITTTNANGLGWLLNKGLSLLPVSTDDELLEFIGVERSHPSCHALIELIAQLEAPELFEKNVFSDTRSEVQGMIDSAVSNHIARLSSSRNSLSMDSEELERLIKSFQIHTPHCSLFIGAQSLSQQLESLPEALQSGVNSADILLGSTQYMLTNSLVEESIATYQRTLNRINYLSGVAGQINGAIKRKAIDGEKIHLPAAWSELISLPFIGQPVIDVESDLAHLKNQYQTLSNEFDTLISALQKNFDLNFNKALLNRTQHFEAMCRSTKKNALSKPEIVSYRDLLARLTSCLYRGSLVLRRAGIEVLKKHKIFESNSELREHVHERKHFVFVSPLDRKAKKLLRLTDSRPDLLHVIDEILQHDNLENKDRESLWLVRSGYLLAGLPDQLSSSFINLPIITQKGDRRLIDLIQYDQINRDAFVMLVTSAFKSNLSGLQYRANKQSFVVTRTLSPYLGSKLVYVPKDKDWLVPSQMFEGRFADILQSDYMVWKDAGRLCVIDTAKHLSNIKKSVFSSEEVLAFLRELPHRTFIQTEVRGLGVNVDGIAFNNGDIPSLKTFSNCVQVKVSRTNTSLVQTLNRWFEGGKVSPPSIQFERAYYKKDDQIHEDAAKRKIRFQMPATELVHASDDAGWTPSYLLGIDPGEYGMGLSLVSINNGEVLDSGFIHINSLINFASKKSNHQTKVVPRQQYKSPYANYLEQSKDSAAGDIAHILDRLIYKLNALPVFEALSGNSQSAADQVWTKVLSFYTWGDNDAQNSIRKQHWFGASHWDIKGMLRQPPTEKKPKPYIAFPGSQVSSYGNSQRCSCCGRNPIEQLREMAKDTSIKELKIRNSEIQLFDGTIKLFNPDPSTVIERRRHNLGPSRIPVADRTFKNISPSSLEFKELITIVSRSIRHSPEFIAKKRGIGSEYFCAYSDCNSSLNSEANAAANVAQKFQKQLFFEL

SEQ ID NO: 242 - protein, 767 aa, synthetic construct
  REGION 1..767: note = Cas12g1 polypeptide sequence
MAQASSTPAVSPRPRPRYREERTLVRKLLPRPGQSKQEFRENVKKLRKAFLQFNADVSGVCQWAIQFRPRYGKPAEPTETFWKFFLEPETSLPPNDSRSPEFRRLQAFEAAAGINGAAALDDPAFTNELRDSILAVASRPKTKEAQRLFSRLKDYQPAHRMILAKVAAEWIESRYRRAHQNWERNYEEWKKEKQEWEQNHPELTPEIREAFNQIFQQLEVKEKRVRICPAARLLQNKDNCQYAGKNKHSVLCNQFNEFKKNHLQGKAIKFFYKDAEKYLRCGLQSLKPNVQGPFREDWNKYLRYMNLKEETLRGKNGGRLPHCKNLGQECEFNPHTALCKQYQQQLSSRPDLVQHDELYRKWRREYWREPRKPVFRYPSVKRHSIAKIFGENYFQADFKNSVVGLRLDSMPAGQYLEFAFAPWPRNYRPQPGETEISSVHLHFVGTRPRIGFRFRVPHKRSRFDCTQEELDELRSRTFPRKAQDQKFLEAARKRLLETFPGNAEQELRLLAVDLGTDSARAAFFIGKTFQQAFPLKIVKIEKLYEQWPNQKQAGDRRDASSKQPRPGLSRDHVGRHLQKMRAQASEIAQKRQELTGTPAPETTTDQAAKKATLQPFDLRGLTVHTARMIRDWARLNARQIIQLAEENQVDLIVLESLRGFRPPGYENLDQEKKRRVAFFAHGRIRRKVTEKAVERGMRVVTVPYLASSKVCAECRKKQKDNKQWEKNKKRGLFKCEGCGSQAQVDENAARVLGRVFWGEIELPTAIP

SEQ ID NO: 243 - protein, 870 aa, synthetic construct
  REGION 1..870: note = Cas12h1 polypeptide sequence
MKVHEIPRSQLLKIKQYEGSFVEWYRDLQEDRKKFASLLFRWAAFGYAAREDDGATYISPSQALLERRLLLGDAEDVAIKFLDVLFKGGAPSSSCYSLFYEDFALRDKAKYSGAKREFIEGLATMPLDKIIERIRQDEQLSKIPAEEWLILGAEYSPEEIWEQVAPRIVNVDRSLGKQLRERLGIKCRRPHDAGYCKILMEVVARQLRSHNETYHEYLNQTHEMKTKVANNLTNEFDLVCEFAEVLEEKNYGLGWYVLWQGVKQALKEQKKPTKIQIAVDQLRQPKFAGLLTAKWRALKGAYDTWKLKKRLEKRKAFPYMPNWDNDYQIPVGLTGLGVFTLEVKRTEVVVDLKEHGKLFCSHSHYFGDLTAEKHPSRYHLKFRHKLKLRKRDSRVEPTIGPWIEAALREITIQKKPNGVFYLGLPYALSHGIDNFQIAKRFFSAAKPDKEVINGLPSEMVVGAADLNLSNIVAPVKARIGKGLEGPLHALDYGYGELIDGPKILTPDGPRCGELISLKRDIVEIKSAIKEFKACQREGLTMSEETTTWLSEVESPSDSPRCMIQSRIADTSRRLNSFKYQMNKEGYQDLAEALRLLDAMDSYNSLLESYQRMHLSPGEQSPKEAKFDTKRASFRDLLRRRVAHTIVEYFDDCDIVFFEDLDGPSDSDSRNNALVKLLSPRTLLLYIRQALEKRGIGMVEVAKDGTSQNNPISGHVGWRNKQNKSEIYFYEDKELLVMDADEVGAMNILCRGLNHSVCPYSFVTKAPEKKNDEKKEGDYGKRVKRFLKDRYGSSNVRFLVASMGFVTVTTKRPKDALVGKRLYYHGGELVTHDLHNRMKDEIKYLVEKEVLARRVSLSDSTIKSYKSFAHV

SEQ ID NO: 244 - protein, 1093 aa, synthetic construct
  REGION 1..1093: note = Cas12i1 polypeptide sequence
MSNKEKNASETRKAYTTKMIPRSHDRMKLLGNFMDYLMDGTPIFFELWNQFGGGIDRDIISGTANKDKISDDLLLAVNWFKVMPINSKPQGVSPSNLANLFQQYSGSEPDIQAQEYFASNFDTEKHQWKDMRVEYERLLAELQLSRSDMHHDLKLMYKEKCIGLSLSTAHYITSVMFGTGAKNNRQTKHQFYSKVIQLLEESTQINSVEQLASIILKAGDCDSYRKLRIRCSRKGATPSILKIVQDYELGTNHDDEVNVPSLIANLKEKLGRFEYECEWKCMEKIKAFLASKVGPYYLGSYSAMLENALSPIKGMTTKNCKFVLKQIDAKNDIKYENEPFGKIVEGFFDSPYFESDTNVKWVLHPHHIGESNIKTLWEDLNAIHSKYEEDIASLSEDKKEKRIKVYQGDVCQTINTYCEEVGKEAKTPLVQLLRYLYSRKDDIAVDKIIDGITFLSKKHKVEKQKINPVIQKYPSFNFGNNSKLLGKIISPKDKLKHNLKCNRNQVDNYIWIEIKVLNTKTMRWEKHHYALSSTRFLEEVYYPATSENPPDALAARFRTKTNGYEGKPALSAEQIEQIRSAPVGLRKVKKRQMRLEAARQQNLLPRYTWGKDFNINICKRGNNFEVTLATKVKKKKEKNYKVVLGYDANIVRKNTYAAIEAHANGDGVIDYNDLPVKPIESGFVTVESQVRDKSYDQLSYNGVKLLYCKPHVESRRSFLEKYRNGTMKDNRGNNIQIDFMKDFEAIADDETSLYYFNMKYCKLLQSSIRNHSSQAKEYREEIFELLRDGKLSVLKLSSLSNLSFVMFKVAKSLIGTYFGHLLKKPKNSKSDVKAPPITDEDKQKADPEMFALRLALEEKRLNKVKSKKEVIANKIVAKALELRDKYGPVLIKGENISDTTKKGKKSSTNSFLMDWLARGVANKVKEMVMMHQGLEFVEVNPNFTSHQDPFVHKNPENTFRARYSRCTPSELTEKNRKEILSFLSDKPSKRPTNAYYNEGAMAFLATYGLKKNDVLGVSLEKFKQIMANILHQRSEDQLLFPSRGGMFYLATYKLDADATSVNWNGKQFWVCNADLVAAYNVGLVDIQKDFKKK

SEQ ID NO: 245 - protein, 1054 aa, synthetic construct
  REGION 1..1054: note = Cas12i2 polypeptide sequence
MSSAIKSYKSVLRPNERKNQLLKSTIQCLEDGSAFFFKMLQGLFGGITPEIVRFSTEQEKQQQDIALWCAVNWFRPVSQDSLTHTIASDNLVEKFEEYYGGTASDAIKQYFSASIGESYYWNDCRQQYYDLCRELGVEVSDLTHDLEILCREKCLAVATESNQNNSIISVLFGTGEKEDRSVKLRITKKILEAISNLKEIPKNVAPIQEIILNVAKATKETFRQVYAGNLGAPSTLEKFIAKDGQKEFDLKKLQTDLKKVIRGKSKERDWCCQEELRSYVEQNTIQYDLWAWGEMFNKAHTALKIKSTRNYNFAKQRLEQFKEIQSLNNLLVVKKLNDFFDSEFFSGEETYTICVHHLGGKDLSKLYKAWEDDPADPENAIVVLCDDLKNNFKKEPIRNILRYIFTIRQECSAQDILAAAKYNQQLDRYKSQKANPSVLGNQGFTWTNAVILPEKAQRNDRPNSLDLRIWLYLKLRHPDGRWKKHHIPFYDTRFFQEIYAAGNSPVDTCQFRTPRFGYHLPKLTDQTAIRVNKKHVKAAKTEARIRLAIQQGTLPVSNLKITEISATINSKGQVRIPVKFDVGRQKGTLQIGDRFCGYDQNQTASHAYSLWEVVKEGQYHKELGCFVRFISSGDIVSITENRGNQFDQLSYEGLAYPQYADWRKKASKFVSLWQITKKNKKKEIVTVEAKEKFDAICKYQPRLYKFNKEYAYLLRDIVRGKSLVELQQIRQEIFRFIEQDCGVTRLGSLSLSTLETVKAVKGIIYSYFSTALNASKNNPISDEQRKEFDPELFALLEKLELIRTRKKKQKVERIANSLIQTCLENNIKFIRGEGDLSTTNNATKKKANSRSMDWLARGVFNKIRQLAPMHNITLFGCGSLYTSHQDPLVHRNPDKAMKCRWAAIPVKDIGDWVLRKLSQNLRAKNIGTGEYYHQGVKEFLSHYELQDLEEELLKWRSDRKSNIPCWVLQNRLAEKLGNKEAVVYIPVRGGRIYFATHKVATGAVSIVFDQKQVWVCNADHVAAANIALTVKGIGEQSSDEENPDGSRIKLQLTS

SEQ ID NO: 246 - protein, 4 aa, synthetic construct
  REGION 1..4: note = synthetic peptide sequence
GGGS

SEQ ID NO: 247 - protein, 5 aa, synthetic construct
  REGION 1..5: note = synthetic peptide sequence
GGGGS

SEQ ID NO: 248 - protein, 5 aa, synthetic construct
  REGION 1..5: note = synthetic peptide sequence
EAAAK

SEQ ID NO: 249 - protein, 16 aa, synthetic construct
  REGION 1..16: note = synthetic peptide sequence
SGSETPGTSESATPES

SEQ ID NO: 250 - protein, 6 aa, synthetic construct
  REGION 1..6: note = linker peptide sequence
GGSGGS

SEQ ID NO: 251 - protein, 20 aa, synthetic construct
  REGION 1..20: note = synthetic peptide sequence
GSSGSETPGTSESATPESSG

SEQ ID NO: 252 - DNA, 18 bp, synthetic construct
  misc_feature 1..18: note = synthetic oligonucleotide sequence
  source 1..18: mol_type = other DNA
ggaggctctggaggaagc

SEQ ID NO: 253 - DNA, 60 bp, synthetic construct
  misc_feature 1..60: note = synthetic oligonucleotide sequence
  source 1..60: mol_type = other DNA
ggctcttctggatctgaaacacctggcacaagcgagagcgccacccctgagagctctggc

SEQ ID NO: 254 - protein, 1129 aa, Alicyclobacillus acidiphilus
  REGION 1..1129: note = MISC_FEATURE - AacCas12b polypeptide sequence
MAVKSMKVKLRLDNMPEIRAGLWKLHTEVNAGVRYYTEWLSLLRQENLYRRSPNGDGEQECYKTAEECKAELLERLRARQVENGHCGPAGSDDELLQLARQLYELLVPQAIGAKGDAQQIARKFLSPLADKDAVGGLGIAKAGNKPRWVRMREAGEPGWEEEKAKAEARKSTDRTADVLRALADFGLKPLMRVYTDSDMSSVQWKPLRKGQAVRTWDRDMFQQAIERMMSWESWNQRVGEAYAKLVEQKSRFEQKNFVGQEHLVQLVNQLQQDMKEASHGLESKEQTAHYLTGRALRGSDKVFEKWEKLDPDAPFDLYDTEIKNVQRRNTRRFGSHDLFAKLAEPKYQALWREDASFLTRYAVYNSIVRKLNHAKMFATFTLPDATAHPIWTRFDKLGGNLHQYTFLFNEFGEGRHAIRFQKLLTVEDGVAKEVDDVTVPISMSAQLDDLLPRDPHELVALYFQDYGAEQHLAGEFGGAKIQYRRDQLNHLHARRGARDVYLNLSVRVQSQSEARGERRPPYAAVFRLVGDNHRAFVHFDKLSDYLAEHPDDGKLGSEGLLSGLRVMSVDLGLRTSASISVFRVARKDELKPNSEGRVPFCFPIEGNENLVAVHERSQLLKLPGETESKDLRAIREERQRTLRQLRTQLAYLRLLVRCGSEDVGRRERSWAKLIEQPMDANQMTPDWREAFEDELQKLKSLYGICGDREWTEAVYESVRRVWRHMGKQVRDWRKDVRSGERPKIRGYQKDVVGGNSIEQIEYLERQYKFLKSWSFFGKVSGQVIRAEKGSRFAITLREHIDHAKEDRLKKLADRIIMEALGYVYALDDERGKGKWVAKYPPCQLILLEELSEYQFNNDRPPSENNQLMQWSHRGVFQELLNQAQVHDLLVGTMYAAFSSRFDARTGAPGIRCRRVPARCAREQNPEPFPWWLNKFVAEHKLDGCPLRADDLIPTGEGEFFVSPFSAEEGDFHQIHADLNAAQNLQRRLWSDFDISQIRLRCDWGEVDGEPVLIPRTTGKRTADSYGNKVFYTKTGVTYYERERGKKRRKVFAQEELSEEEAELLVEADEAREKSVVLMRDPSGIINRGDWTRQKEFWSMVNQRIEGYLVKQIRSRVRLQESACENTGDI

SEQ ID NO: 255 - protein, 1140 aa, Bacillus hisashii
  REGION 1..1140: note = MISC_FEATURE - BhCas12b polypeptide sequence
MAPKKKRKVGIHGVPAAATRSFILKIEPNEEVKKGLWKTHEVLNHGIAYYMNILKLIRQEAIYEHHEQDPKNPKKVSKAEIQAELWDFVLKMQKCNSFTHEVDKDEVFNILRELYEELVPSSVEKKGEANQLSNKFLYPLVDPNSQSGKGTASSGRKPRWYNLKIAGDPSWEEEKKKWEEDKKKDPLAKILGKLAEYGLIPLFIPYTDSNEPIVKEIKWMEKSRNQSVRRLDKDMFIQALERFLSWESWNLKVKEEYEKVEKEYKTLEERIKEDIQALKALEQYEKERQEQLLRDTLNTNEYRLSKRGLRGWREIIQKWLKMDENEPSEKYLEVFKDYQRKHPREAGDYSVYEFLSKKENHFIWRNHPEYPYLYATFCEIDKKKKDAKQQATFTLADPINHPLWVRFEERSGSNLNKYRILTEQLHTEKLKKKLTVQLDRLIYPTESGGWEEKGKVDIVLLPSRQFYNQIFLDIEEKGKHAFTYKDESIKFPLKGTLGGARVQFDRDHLRRYPHKVESGNVGRIYFNMTVNIEPTESPVSKSLKIHRDDFPKVVNFKPKELTEWIKDSKGKKLKSGIESLEIGLRVMSIDLGQRQAAAASIFEVVDQKPDIEGKLFFPIKGTELYAVHRASFNIKLPGETLVKSREVLRKAREDNLKLMNQKLNFLRNVLHFQQFEDITEREKRVTKWISRQENSDVPLVYQDELIQIRELMYKPYKDWVAFLKQLHKRLEVEIGKEVKHWRKSLSDGRKGLYGISLKNIDEIDRTRKFLLRWSLRPTEPGEVRRLEPGQRFAIDQLNHLNALKEDRLKKMANTIIMHALGYCYDVRKKKWQAKNPACQIILFEDLSNYNPYEERSRFENSKLMKWSRREIPRQVALQGEIYGLQVGEVGAQFSSRFHAKTGSPGIRCSVVTKEKLQDNRFFKNLQREGRLTLDKIAVLKEGDLYPDKGGEKFISLSKDRKCVTTHADINAAQNLQKRFWTRTHGFYKVYCKAYQVDGQTVYIPESKDQKQKIIEEFGEGYFILKDGVYEWVNAGKLKIKKGSSKQSSSELVDSDILKDSFDLASELKGEKLMLYRDPSGNVFPSDKWMAAGVFFGKLERILISKLTNQYSISTIEDDSSKQSMKRPAATKKAGQAKKKK

SEQ ID NO: 256 - protein, 1108 aa, Bacillus thermoamylovorans
  REGION 1..1108: note = MISC_FEATURE - BTCas12b polypeptide sequence
MATRSFILKIEPNEEVKKGLWKTHEVLNHGIAYYMNILKLIRQEAIYEHHEQDPKNPKKVSKAEIQAELWDFVLKMQKCNSFTHEVDKDVVFNILRELYEELVPSSVEKKGEANQLSNKFLYPLVDPNSQSGKGTASSGRKPRWYNLKIAGDPSWEEEKKKWEEDKKKDPLAKILGKLAEYGLIPLFIPFTDSNEPIVKEIKWMEKSRNQSVRRLDKDMFIQALERFLSWESWNLKVKEEYEKVEKEHKTLEERIKEDIQAFKSLEQYEKERQEQLLRDTLNTNEYRLSKRGLRGWREIIQKWLKMDENEPSEKYLEVFKDYQRKHPREAGDYSVYEFLSKKENHFIWRNHPEYPYLYATFCEIDKKKKDAKQQATFTLADPINHPLWVRFEERSGSNLNKYRILTEQLHTEKLKKKLTVQLDRLIYPTESGGWEEKGKVDIVLLPSRQFYNQIFLDIEEKGKHAFTYKDESIKFPLKGTLGGARVQFDRDHLRRYPHKVESGNVGRIYFNMTVNIEPTESPVSKSLKIHRDDFPKFVNFKPKELTEWIKDSKGKKLKSGIESLEIGLRVMSIDLGQRQAAAASIFEVVDQKPDIEGKLFFPIKGTELYAVHRASFNIKLPGETLVKSREVLRKAREDNLKLMNQKLNFLRNVLHFQQFEDITEREKRVTKWISRQENSDVPLVYQDELIQIRELMYKPYKDWVAFLKQLHKRLEVEIGKEVKHWRKSLSDGRKGLYGISLKNIDEIDRTRKFLLRWSLRPTEPGEVRRLEPGQRFAIDQLNHLNALKEDRLKKMANTIIMHALGYCYDVRKKKWQAKNPACQIILFEDLSNYNPYEERSRFENSKLMKWSRREIPRQVALQGEIYGLQVGEVGAQFSSRFHAKTGSPGIRCSVVTKEKLQDNRFFKNLQREGRLTLDKIAVLKEGDLYPDKGGEKFISLSKDRKLVTTHADINAAQNLQKRFWTRTHGFYKVYCKAYQVDGQTVYIPESKDQKQKIIEEFGEGYFILKDGVYEWGNAGKLKIKKGSSKQSSSELVDSDILKDSFDLASELKGEKLMLYRDPSGNVFPSDKWMAAGVFFGKLERILISKLTNQYSISTIEDDSSKQSM

SEQ ID NO: 257 - protein, 1112 aa, Bacillus sp.
  REGION 1..1112: note = MISC_FEATURE - BvCas12b (Bacillus sp. V3-13) polypeptide sequence
MAIRSIKLKMKTNSGTDSIYLRKALWRTHQLINEGIAYYMNLLTLYRQEAIGDKTKEAYQAELINIIRNQQRNNGSSEEHGSDQEILALLRQLYELIIPSSIGESGDANQLGNKFLYPLVDPNSQSGKGTSNAGRKPRWKRLKEEGNPDWELEKKKDEERKAKDPTVKIFDNLNKYGLLPLFPLFTNIQKDIEWLPLGKRQSVRKWDKDMFIQAIERLLSWESWNRRVADEYKQLKEKTESYYKEHLTGGEEWIEKIRKFEKERNMELEKNAFAPNDGYFITSRQIRGWDRVYEKWSKLPESASPEELWKVVAEQQNKMSEGFGDPKVFSFLANRENRDIWRGHSERIYHIAAYNGLQKKLSRTKEQATFTLPDAIEHPLWIRYESPGGTNLNLFKLEEKQKKNYYVTLSKIIWPSEEKWIEKENIEIPLAPSIQFNRQIKLKQHVKGKQEISFSDYSSRISLDGVLGGSRIQFNRKYIKNHKELLGEGDIGPVFFNLVVDVAPLQETRNGRLQSPIGKALKVISSDFSKVIDYKPKELMDWMNTGSASNSFGVASLLEGMRVMSIDMGQRTSASVSIFEVVKELPKDQEQKLFYSINDTELFAIHKRSFLLNLPGEVVTKNNKQQRQERRKKRQFVRSQIRMLANVLRLETKKTPDERKKAIHKLMEIVQSYDSWTASQKEVWEKELNLLTNMAAFNDEIWKESLVELHHRIEPYVGQIVSKWRKGLSEGRKNLAGISMWNIDELEDTRRLLISWSKRSRTPGEANRIETDEPFGSSLLQHIQNVKDDRLKQMANLIIMTALGFKYDKEEKDRYKRWKETYPACQIILFENLNRYLFNLDRSRRENSRLMKWAHRSIPRTVSMQGEMFGLQVGDVRSEYSSRFHAKTGAPGIRCHALTEEDLKAGSNTLKRLIEDGFINESELAYLKKGDIIPSQGGELFVTLSKRYKKDSDNNELTVIHADINAAQNLQKRFWQQNSEVYRVPCQLARMGEDKLYIPKSQTETIKKYFGKGSFVKNNTEQEVYKWEKSEKMKIKTDTTFDLQDLDGFEDISKTIELAQEQQKKYLTMFRDPSGYFFNNETWRPQKEYWSIVNNIIKSCLKKKILSNKVEL

SEQ ID NO: 258 - DNA, 47 bp, synthetic construct
  misc_feature 1..47: note = 5'UTR oligonucleotide sequence
  source 1..47: mol_type = other DNA
gggaaataagagagaaaagaagagtaagaagaaatataagagccacc

SEQ ID NO: 259 - DNA, 101 bp, synthetic construct
  misc_feature 1..101: note = 3'UTR (TriLink standard UTR)polynucleotide sequence
  source 1..101: mol_type = other DNA
gctggagcctcggtggccatgcttcttgccccttgggcctccccccagcccctcctccccttcctgcacccgtacccccgtggtctttgaataaagtctga

SEQ ID NO: 260 - DNA, 3420 bp, Bacillus hisashii
  misc_feature 1..3420: note = bhCas12b (V4) polynucleotide sequence
  source 1..3420: mol_type = genomic DNA
atggccccaaagaagaagcggaaggtcggtatccacggagtcccagcagccgccaccagatccttcatcctgaagatcgagcccaacgaggaagtgaagaaaggcctctggaaaacccacgaggtgctgaaccacggaatcgcctactacatgaatatcctgaagctgatccggcaagaggccatctacgagcaccacgagcaggaccccaagaatcccaagaaggtgtccaaggccgagatccaggccgagctgtgggatttcgtgctgaagatgcagaagtgcaacagcttcacacacgaggtggacaaggacgaggtgttcaacatcctgagagagctgtacgaggaactggtgcccagcagcgtggaaaagaagggcgaagccaaccagctgagcaacaagtttctgtaccctctggtggaccccaacagccagtctggaaagggaacagccagcagcggcagaaagcccagatggtacaacctgaagattgccggcgatccctcctgggaagaagagaagaagaagtgggaagaagataagaaaaaggacccgctggccaagatcctgggcaagctggctgagtacggactgatccctctgttcatcccctacaccgacagcaacgagcccatcgtgaaagaaatcaagtggatggaaaagtcccggaaccagagcgtgcggcggctggataaggacatgttcattcaggccctggaacggttcctgagctgggagagctggaacctgaaagtgaaagaggaatacgagaaggtcgagaaagagtacaagaccctggaagagaggatcaaagaggacatccaggctctgaaggctctggaacagtatgagaaagagcggcaagaacagctgctgcgggacaccctgaacaccaacgagtaccggctgagcaagagaggccttagaggctggcgggaaatcatccagaaatggctgaaaatggacgagaacgagccctccgagaagtacctggaagtgttcaaggactaccagcggaagcaccctagagaggccggcgattacagcgtgtacgagttcctgtccaagaaagagaaccacttcatctggcggaatcaccctgagtacccctacctgtacgccaccttctgcgagatcgacaagaaaaagaaggacgccaagcagcaggccaccttcacactggccgatcctatcaatcaccctctgtgggtccgattcgaggaaagaagcggcagcaacctgaacaagtacagaatcctgaccgagcagctgcacaccgagaagctgaagaaaaagctgacagtgcagctggaccggctgatctaccctacagaatctggcggctgggaagagaagggcaaagtggacattgtgctgctgcccagccggcagttctacaaccagatcttcctggacatcgaggaaaagggcaagcacgccttcacctacaaggatgagagcatcaagttccctctgaagggcacactcggcggagccagagtgcagttcgacagagatcacctgagaagataccctcacaaggtggaaagcggcaacgtgggcagaatctacttcaacatgaccgtgaacatcgagcctacagagtccccagtgtccaagtctctgaagatccaccgggacgacttccccaaggtggtcaacttcaagcccaaagaactgaccgagtggatcaaggacagcaagggcaagaaactgaagtccggcatcgagtccctggaaatcggcctgagagtgatgagcatcgacctgggacagagacaggccgctgccgcctctattttcgaggtggtggatcagaagcccgacatcgaaggcaagctgtttttcccaatcaagggcaccgagctgtatgccgtgcacagagccagcttcaacatcaagctgcccggcgagacactggtcaagagcagagaagtgctgcggaaggccagagaggacaatctgaaactgatgaaccagaagctcaacttcctgcggaacgtgctgcacttccagcagttcgaggacatcaccgagagagagaagcgggtcaccaagtggatcagcagacaagagaacagcgacgtgcccctggtgtaccaggatgagctgatccagatccgcgagctgatgtacaagccttacaaggactgggtcgccttcctgaagcagctccacaagagactggaagtcgagatcggcaaagaagtgaagcactggcggaagtccctgagcgacggaagaaagggcctgtacggcatctccctgaagaacatcgacgagatcgatcggacccggaagttcctgctgagatggtccctgaggcctaccgaacctggcgaagtgcgtagactggaacccggccagagattcgccatcgaccagctgaatcacctgaacgccctgaaagaagatcggctgaagaagatggccaacaccatcatcatgcacgccctgggctactgctacgacgtgcggaagaagaaatggcaggctaagaaccccgcctgccagatcatcctgttcgaggatctgagcaactacaacccctacgaggaaaggtcccgcttcgagaacagcaagctcatgaagtggtccagacgcgagatccccagacaggttgcactgcagggcgagatctatggcctgcaagtgggagaagtgggcgctcagttcagcagcagattccacgccaagacaggcagccctggcatcagatgtagcgtcgtgaccaaagagaagctgcaggacaatcggttcttcaagaatctgcagagagagggcagactgaccctggacaaaatcgccgtgctgaaagagggcgatctgtacccagacaaaggcggcgagaagttcatcagcctgagcaaggatcggaagtgcgtgaccacacacgccgacatcaacgccgctcagaacctgcagaagcggttctggacaagaacccacggcttctacaaggtgtactgcaaggcctaccaggtggacggccagaccgtgtacatccctgagagcaaggaccagaagcagaagatcatcgaagagttcggcgagggctacttcattctgaaggacggggtgtacgaatgggtcaacgccggcaagctgaaaatcaagaagggcagctccaagcagagcagcagcgagctggtggatagcgacatcctgaaagacagcttcgacctggcctccgagctgaaaggcgaaaagctgatgctgtacagggaccccagcggcaatgtgttccccagcgacaaatggatggccgctggcgtgttcttcggaaagctggaacgcatcctgatcagcaagctgaccaaccagtactccatcagcaccatcgaggacgacagcagcaagcagtctatgaaaaggccggcggccacgaaaaaggccggccaggcaaaaaagaaaaag

SEQ ID NO: 261 - protein, 17 aa, synthetic construct
  REGION 1..17: note = synthetic peptide sequence
MAPKKKRKVGIHGVPAA

SEQ ID NO: 262 - DNA, 51 bp, synthetic construct
  misc_feature 1..51: note = synthetic oligonucleotide sequence
  source 1..51: mol_type = other DNA
atggccccaaagaagaagcggaaggtcggtatccacggagtcccagcagcc

SEQ ID NO: 263 - protein, 1554 aa, synthetic construct
  REGION 1..1554: note = 101 Cas9 TadAins 1015 polypeptide sequence
MDKKYSIGLAIGTNSVGWAVITDEYKVPSKKFKVLGNTDRHSIKKNLIGALLFDSGETAEATRLKRTARRRYTRRKNRICYLQEIFSNEMAKVDDSFFHRLEESFLVEEDKKHERHPIFGNIVDEVAYHEKYPTIYHLRKKLVDSTDKADLRLIYLALAHMIKFRGHFLIEGDLNPDNSDVDKLFIQLVQTYNQLFEENPINASGVDAKAILSARLSKSRRLENLIAQLPGEKKNGLFGNLIALSLGLTPNFKSNFDLAEDAKLQLSKDTYDDDLDNLLAQIGDQYADLFLAAKNLSDAILLSDILRVNTEITKAPLSASMIKRYDEHHQDLTLLKALVRQQLPEKYKEIFFDQSKNGYAGYIDGGASQEEFYKFIKPILEKMDGTEELLVKLNREDLLRKQRTFDNGSIPHQIHLGELHAILRRQEDFYPFLKDNREKIEKILTFRIPYYVGPLARGNSRFAWMTRKSEETITPWNFEEVVDKGASAQSFIERMTNFDKNLPNEKVLPKHSLLYEYFTVYNELTKVKYVTEGMRKPAFLSGEQKKAIVDLLFKTNRKVTVKQLKEDYFKKIECFDSVEISGVEDRFNASLGTYHDLLKIIKDKDFLDNEENEDILEDIVLTLTLFEDREMIEERLKTYAHLFDDKVMKQLKRRRYTGWGRLSRKLINGIRDKQSGKTILDFLKSDGFANRNFMQLIHDDSLTFKEDIQKAQVSGQGDSLHEHIANLAGSPAIKKGILQTVKVVDELVKVMGRHKPENIVIEMARENQTTQKGQKNSRERMKRIEEGIKELGSQILKEHPVENTQLQNEKLYLYYLQNGRDMYVDQELDINRLSDYDVDHIVPQSFLKDDSIDNKVLTRSDKNRGKSDNVPSEEVVKKMKNYWRQLLNAKLITQRKFDNLTKAERGGLSELDKAGFIKRQLVETRQITKHVAQILDSRMNTKYDENDKLIREVKVITLKSKLVSDFRKDFQFYKVREINNYHHAHDAYLNAVVGTALIKKYPKLESEFVYGDYKVGSSGSETPGTSESATPESSGSEVEFSHEYWMRHALTLAKRARDEREVPVGAVLVLNNRVIGEGWNRAIGLHDPTAHAEIMALRQGGLVMQNYRLIDATLYVTFEPCVMCAGAMIHSRIGRVVFGVRNAKTGAAGSLMDVLHYPGMNHRVEITEGILADECAALLCYFFRMPRQVFNAQKKAQSSTDYDVRKMIAKSEQEIGKATAKYFFYSNIMNFFKTEITLANGEIRKRPLIETNGETGEIVWDKGRDFATVRKVLSMPQVNIVKKTEVQTGGFSKESILPKRNSDKLIARKKDWDPKKYGGFDSPTVAYSVLVVAKVEKGKSKKLKSVKELLGITIMERSSFEKNPIDFLEAKGYKEVKKDLIIKLPKYSLFELENGRKRMLASAGELQKGNELALPSKYVNFLYLASHYEKLKGSPEDNEQKQLFVEQHKHYLDEIIEQISEFSKRVILADANLDKVLSAYNKHRDKPIREQAENIIHLFTLTNLGAPAAFKYFDTTIDRKRYTSTKEVLDATLIHQSITGLYETRIDLSQLGGD

SEQ ID NO: 264 - protein, 1554 aa, synthetic construct
  REGION 1..1554: note = 102 Cas9 TadAins 1022 polypeptide sequence
MDKKYSIGLAIGTNSVGWAVITDEYKVPSKKFKVLGNTDRHSIKKNLIGALLFDSGETAEATRLKRTARRRYTRRKNRICYLQEIFSNEMAKVDDSFFHRLEESFLVEEDKKHERHPIFGNIVDEVAYHEKYPTIYHLRKKLVDSTDKADLRLIYLALAHMIKFRGHFLIEGDLNPDNSDVDKLFIQLVQTYNQLFEENPINASGVDAKAILSARLSKSRRLENLIAQLPGEKKNGLFGNLIALSLGLTPNFKSNFDLAEDAKLQLSKDTYDDDLDNLLAQIGDQYADLFLAAKNLSDAILLSDILRVNTEITKAPLSASMIKRYDEHHQDLTLLKALVRQQLPEKYKEIFFDQSKNGYAGYIDGGASQEEFYKFIKPILEKMDGTEELLVKLNREDLLRKQRTFDNGSIPHQIHLGELHAILRRQEDFYPFLKDNREKIEKILTFRIPYYVGPLARGNSRFAWMTRKSEETITPWNFEEVVDKGASAQSFIERMTNFDKNLPNEKVLPKHSLLYEYFTVYNELTKVKYVTEGMRKPAFLSGEQKKAIVDLLFKTNRKVTVKQLKEDYFKKIECFDSVEISGVEDRFNASLGTYHDLLKIIKDKDFLDNEENEDILEDIVLTLTLFEDREMIEERLKTYAHLFDDKVMKQLKRRRYTGWGRLSRKLINGIRDKQSGKTILDFLKSDGFANRNFMQLIHDDSLTFKEDIQKAQVSGQGDSLHEHIANLAGSPAIKKGILQTVKVVDELVKVMGRHKPENIVIEMARENQTTQKGQKNSRERMKRIEEGIKELGSQILKEHPVENTQLQNEKLYLYYLQNGRDMYVDQELDINRLSDYDVDHIVPQSFLKDDSIDNKVLTRSDKNRGKSDNVPSEEVVKKMKNYWRQLLNAKLITQRKFDNLTKAERGGLSELDKAGFIKRQLVETRQITKHVAQILDSRMNTKYDENDKLIREVKVITLKSKLVSDFRKDFQFYKVREINNYHHAHDAYLNAVVGTALIKKYPKLESEFVYGDYKVYDVRKMIGSSGSETPGTSESATPESSGSEVEFSHEYWMRHALTLAKRARDEREVPVGAVLVLNNRVIGEGWNRAIGLHDPTAHAEIMALRQGGLVMQNYRLIDATLYVTFEPCVMCAGAMIHSRIGRVVFGVRNAKTGAAGSLMDVLHYPGMNHRVEITEGILADECAALLCYFFRMPRQVFNAQKKAQSSTDAKSEQEIGKATAKYFFYSNIMNFFKTEITLANGEIRKRPLIETNGETGEIVWDKGRDFATVRKVLSMPQVNIVKKTEVQTGGFSKESILPKRNSDKLIARKKDWDPKKYGGFDSPTVAYSVLVVAKVEKGKSKKLKSVKELLGITIMERSSFEKNPIDFLEAKGYKEVKKDLIIKLPKYSLFELENGRKRMLASAGELQKGNELALPSKYVNFLYLASHYEKLKGSPEDNEQKQLFVEQHKHYLDEIIEQISEFSKRVILADANLDKVLSAYNKHRDKPIREQAENIIHLFTLTNLGAPAAFKYFDTTIDRKRYTSTKEVLDATLIHQSITGLYETRIDLSQLGGD

SEQ ID NO: 265 - protein, 1554 aa, synthetic construct
  REGION 1..1554: note = 103 Cas9 TadAins 1029 polypeptide sequence
MDKKYSIGLAIGTNSVGWAVITDEYKVPSKKFKVLGNTDRHSIKKNLIGALLFDSGETAEATRLKRTARRRYTRRKNRICYLQEIFSNEMAKVDDSFFHRLEESFLVEEDKKHERHPIFGNIVDEVAYHEKYPTIYHLRKKLVDSTDKADLRLIYLALAHMIKFRGHFLIEGDLNPDNSDVDKLFIQLVQTYNQLFEENPINASGVDAKAILSARLSKSRRLENLIAQLPGEKKNGLFGNLIALSLGLTPNFKSNFDLAEDAKLQLSKDTYDDDLDNLLAQIGDQYADLFLAAKNLSDAILLSDILRVNTEITKAPLSASMIKRYDEHHQDLTLLKALVRQQLPEKYKEIFFDQSKNGYAGYIDGGASQEEFYKFIKPILEKMDGTEELLVKLNREDLLRKQRTFDNGSIPHQIHLGELHAILRRQEDFYPFLKDNREKIEKILTFRIPYYVGPLARGNSRFAWMTRKSEETITPWNFEEVVDKGASAQSFIERMTNFDKNLPNEKVLPKHSLLYEYFTVYNELTKVKYVTEGMRKPAFLSGEQKKAIVDLLFKTNRKVTVKQLKEDYFKKIECFDSVEISGVEDRFNASLGTYHDLLKIIKDKDFLDNEENEDILEDIVLTLTLFEDREMIEERLKTYAHLFDDKVMKQLKRRRYTGWGRLSRKLINGIRDKQSGKTILDFLKSDGFANRNFMQLIHDDSLTFKEDIQKAQVSGQGDSLHEHIANLAGSPAIKKGILQTVKVVDELVKVMGRHKPENIVIEMARENQTTQKGQKNSRERMKRIEEGIKELGSQILKEHPVENTQLQNEKLYLYYLQNGRDMYVDQELDINRLSDYDVDHIVPQSFLKDDSIDNKVLTRSDKNRGKSDNVPSEEVVKKMKNYWRQLLNAKLITQRKFDNLTKAERGGLSELDKAGFIKRQLVETRQITKHVAQILDSRMNTKYDENDKLIREVKVITLKSKLVSDFRKDFQFYKVREINNYHHAHDAYLNAVVGTALIKKYPKLESEFVYGDYKVYDVRKMIAKSEQEIGSSGSETPGTSESATPESSGSEVEFSHEYWMRHALTLAKRARDEREVPVGAVLVLNNRVIGEGWNRAIGLHDPTAHAEIMALRQGGLVMQNYRLIDATLYVTFEPCVMCAGAMIHSRIGRVVFGVRNAKTGAAGSLMDVLHYPGMNHRVEITEGILADECAALLCYFFRMPRQVFNAQKKAQSSTDGKATAKYFFYSNIMNFFKTEITLANGEIRKRPLIETNGETGEIVWDKGRDFATVRKVLSMPQVNIVKKTEVQTGGFSKESILPKRNSDKLIARKKDWDPKKYGGFDSPTVAYSVLVVAKVEKGKSKKLKSVKELLGITIMERSSFEKNPIDFLEAKGYKEVKKDLIIKLPKYSLFELENGRKRMLASAGELQKGNELALPSKYVNFLYLASHYEKLKGSPEDNEQKQLFVEQHKHYLDEIIEQISEFSKRVILADANLDKVLSAYNKHRDKPIREQAENIIHLFTLTNLGAPAAFKYFDTTIDRKRYTSTKEVLDATLIHQSITGLYETRIDLSQLGGD

SEQ ID NO: 266 - protein, 1554 aa, synthetic construct
  REGION 1..1554: note = 103 Cas9 TadAins 1040 polypeptide sequence
MDKKYSIGLAIGTNSVGWAVITDEYKVPSKKFKVLGNTDRHSIKKNLIGALLFDSGETAEATRLKRTARRRYTRRKNRICYLQEIFSNEMAKVDDSFFHRLEESFLVEEDKKHERHPIFGNIVDEVAYHEKYPTIYHLRKKLVDSTDKADLRLIYLALAHMIKFRGHFLIEGDLNPDNSDVDKLFIQLVQTYNQLFEENPINASGVDAKAILSARLSKSRRLENLIAQLPGEKKNGLFGNLIALSLGLTPNFKSNFDLAEDAKLQLSKDTYDDDLDNLLAQIGDQYADLFLAAKNLSDAILLSDILRVNTEITKAPLSASMIKRYDEHHQDLTLLKALVRQQLPEKYKEIFFDQSKNGYAGYIDGGASQEEFYKFIKPILEKMDGTEELLVKLNREDLLRKQRTFDNGSIPHQIHLGELHAILRRQEDFYPFLKDNREKIEKILTFRIPYYVGPLARGNSRFAWMTRKSEETITPWNFEEVVDKGASAQSFIERMTNFDKNLPNEKVLPKHSLLYEYFTVYNELTKVKYVTEGMRKPAFLSGEQKKAIVDLLFKTNRKVTVKQLKEDYFKKIECFDSVEISGVEDRFNASLGTYHDLLKIIKDKDFLDNEENEDILEDIVLTLTLFEDREMIEERLKTYAHLFDDKVMKQLKRRRYTGWGRLSRKLINGIRDKQSGKTILDFLKSDGFANRNFMQLIHDDSLTFKEDIQKAQVSGQGDSLHEHIANLAGSPAIKKGILQTVKVVDELVKVMGRHKPENIVIEMARENQTTQKGQKNSRERMKRIEEGIKELGSQILKEHPVENTQLQNEKLYLYYLQNGRDMYVDQELDINRLSDYDVDHIVPQSFLKDDSIDNKVLTRSDKNRGKSDNVPSEEVVKKMKNYWRQLLNAKLITQRKFDNLTKAERGGLSELDKAGFIKRQLVETRQITKHVAQILDSRMNTKYDENDKLIREVKVITLKSKLVSDFRKDFQFYKVREINNYHHAHDAYLNAVVGTALIKKYPKLESEFVYGDYKVYDVRKMIAKSEQEIGKATAKYFFYSGSSGSETPGTSESATPESSGSEVEFSHEYWMRHALTLAKRARDEREVPVGAVLVLNNRVIGEGWNRAIGLHDPTAHAEIMALRQGGLVMQNYRLIDATLYVTFEPCVMCAGAMIHSRIGRVVFGVRNAKTGAAGSLMDVLHYPGMNHRVEITEGILADECAALLCYFFRMPRQVFNAQKKAQSSTDNIMNFFKTEITLANGEIRKRPLIETNGETGEIVWDKGRDFATVRKVLSMPQVNIVKKTEVQTGGFSKESILPKRNSDKLIARKKDWDPKKYGGFDSPTVAYSVLVVAKVEKGKSKKLKSVKELLGITIMERSSFEKNPIDFLEAKGYKEVKKDLIIKLPKYSLFELENGRKRMLASAGELQKGNELALPSKYVNFLYLASHYEKLKGSPEDNEQKQLFVEQHKHYLDEIIEQISEFSKRVILADANLDKVLSAYNKHRDKPIREQAENIIHLFTLTNLGAPAAFKYFDTTIDRKRYTSTKEVLDATLIHQSITGLYETRIDLSQLGGD

SEQ ID NO: 267 - protein, 1554 aa, synthetic construct
  REGION 1..1554: note = 105 Cas9 TadAins 1068 polypeptide sequence
MDKKYSIGLAIGTNSVGWAVITDEYKVPSKKFKVLGNTDRHSIKKNLIGALLFDSGETAEATRLKRTARRRYTRRKNRICYLQEIFSNEMAKVDDSFFHRLEESFLVEEDKKHERHPIFGNIVDEVAYHEKYPTIYHLRKKLVDSTDKADLRLIYLALAHMIKFRGHFLIEGDLNPDNSDVDKLFIQLVQTYNQLFEENPINASGVDAKAILSARLSKSRRLENLIAQLPGEKKNGLFGNLIALSLGLTPNFKSNFDLAEDAKLQLSKDTYDDDLDNLLAQIGDQYADLFLAAKNLSDAILLSDILRVNTEITKAPLSASMIKRYDEHHQDLTLLKALVRQQLPEKYKEIFFDQSKNGYAGYIDGGASQEEFYKFIKPILEKMDGTEELLVKLNREDLLRKQRTFDNGSIPHQIHLGELHAILRRQEDFYPFLKDNREKIEKILTFRIPYYVGPLARGNSRFAWMTRKSEETITPWNFEEVVDKGASAQSFIERMTNFDKNLPNEKVLPKHSLLYEYFTVYNELTKVKYVTEGMRKPAFLSGEQKKAIVDLLFKTNRKVTVKQLKEDYFKKIECFDSVEISGVEDRFNASLGTYHDLLKIIKDKDFLDNEENEDILEDIVLTLTLFEDREMIEERLKTYAHLFDDKVMKQLKRRRYTGWGRLSRKLINGIRDKQSGKTILDFLKSDGFANRNFMQLIHDDSLTFKEDIQKAQVSGQGDSLHEHIANLAGSPAIKKGILQTVKVVDELVKVMGRHKPENIVIEMARENQTTQKGQKNSRERMKRIEEGIKELGSQILKEHPVENTQLQNEKLYLYYLQNGRDMYVDQELDINRLSDYDVDHIVPQSFLKDDSIDNKVLTRSDKNRGKSDNVPSEEVVKKMKNYWRQLLNAKLITQRKFDNLTKAERGGLSELDKAGFIKRQLVETRQITKHVAQILDSRMNTKYDENDKLIREVKVITLKSKLVSDFRKDFQFYKVREINNYHHAHDAYLNAVVGTALIKKYPKLESEFVYGDYKVYDVRKMIAKSEQEIGKATAKYFFYSNIMNFFKTEITLANGEIRKRPLIETNGEGSSGSETPGTSESATPESSGSEVEFSHEYWMRHALTLAKRARDEREVPVGAVLVLNNRVIGEGWNRAIGLHDPTAHAEIMALRQGGLVMQNYRLIDATLYVTFEPCVMCAGAMIHSRIGRVVFGVRNAKTGAAGSLMDVLHYPGMNHRVEITEGILADECAALLCYFFRMPRQVFNAQKKAQSSTDTGEIVWDKGRDFATVRKVLSMPQVNIVKKTEVQTGGFSKESILPKRNSDKLIARKKDWDPKKYGGFDSPTVAYSVLVVAKVEKGKSKKLKSVKELLGITIMERSSFEKNPIDFLEAKGYKEVKKDLIIKLPKYSLFELENGRKRMLASAGELQKGNELALPSKYVNFLYLASHYEKLKGSPEDNEQKQLFVEQHKHYLDEIIEQISEFSKRVILADANLDKVLSAYNKHRDKPIREQAENIIHLFTLTNLGAPAAFKYFDTTIDRKRYTSTKEVLDATLIHQSITGLYETRIDLSQLGGD

SEQ ID NO: 268 - protein, 1554 aa, synthetic construct
  REGION 1..1554: note = 106 Cas9 TadAins 1247 polypeptide sequence
MDKKYSIGLAIGTNSVGWAVITDEYKVPSKKFKVLGNTDRHSIKKNLIGALLFDSGETAEATRLKRTARRRYTRRKNRICYLQEIFSNEMAKVDDSFFHRLEESFLVEEDKKHERHPIFGNIVDEVAYHEKYPTIYHLRKKLVDSTDKADLRLIYLALAHMIKFRGHFLIEGDLNPDNSDVDKLFIQLVQTYNQLFEENPINASGVDAKAILSARLSKSRRLENLIAQLPGEKKNGLFGNLIALSLGLTPNFKSNFDLAEDAKLQLSKDTYDDDLDNLLAQIGDQYADLFLAAKNLSDAILLSDILRVNTEITKAPLSASMIKRYDEHHQDLTLLKALVRQQLPEKYKEIFFDQSKNGYAGYIDGGASQEEFYKFIKPILEKMDGTEELLVKLNREDLLRKQRTFDNGSIPHQIHLGELHAILRRQEDFYPFLKDNREKIEKILTFRIPYYVGPLARGNSRFAWMTRKSEETITPWNFEEVVDKGASAQSFIERMTNFDKNLPNEKVLPKHSLLYEYFTVYNELTKVKYVTEGMRKPAFLSGEQKKAIVDLLFKTNRKVTVKQLKEDYFKKIECFDSVEISGVEDRFNASLGTYHDLLKIIKDKDFLDNEENEDILEDIVLTLTLFEDREMIEERLKTYAHLFDDKVMKQLKRRRYTGWGRLSRKLINGIRDKQSGKTILDFLKSDGFANRNFMQLIHDDSLTFKEDIQKAQVSGQGDSLHEHIANLAGSPAIKKGILQTVKVVDELVKVMGRHKPENIVIEMARENQTTQKGQKNSRERMKRIEEGIKELGSQILKEHPVENTQLQNEKLYLYYLQNGRDMYVDQELDINRLSDYDVDHIVPQSFLKDDSIDNKVLTRSDKNRGKSDNVPSEEVVKKMKNYWRQLLNAKLITQRKFDNLTKAERGGLSELDKAGFIKRQLVETRQITKHVAQILDSRMNTKYDENDKLIREVKVITLKSKLVSDFRKDFQFYKVREINNYHHAHDAYLNAVVGTALIKKYPKLESEFVYGDYKVYDVRKMIAKSEQEIGKATAKYFFYSNIMNFFKTEITLANGEIRKRPLIETNGETGEIVWDKGRDFATVRKVLSMPQVNIVKKTEVQTGGFSKESILPKRNSDKLIARKKDWDPKKYGGFDSPTVAYSVLVVAKVEKGKSKKLKSVKELLGITIMERSSFEKNPIDFLEAKGYKEVKKDLIIKLPKYSLFELENGRKRMLASAGELQKGNELALPSKYVNFLYLASHYEKLKGGSSGSETPGTSESATPESSGSEVEFSHEYWMRHALTLAKRARDEREVPVGAVLVLNNRVIGEGWNRAIGLHDPTAHAEIMALRQGGLVMQNYRLIDATLYVTFEPCVMCAGAMIHSRIGRVVFGVRNAKTGAAGSLMDVLHYPGMNHRVEITEGILADECAALLCYFFRMPRQVFNAQKKAQSSTDSPEDNEQKQLFVEQHKHYLDEIIEQISEFSKRVILADANLDKVLSAYNKHRDKPIREQAENIIHLFTLTNLGAPAAFKYFDTTIDRKRYTSTKEVLDATLIHQSITGLYETRIDLSQLGGD

SEQ ID NO: 269 - protein, 1554 aa, synthetic construct
  REGION 1..1554: note = 107 Cas9 TadAins 1054 polypeptide sequence
MDKKYSIGLAIGTNSVGWAVITDEYKVPSKKFKVLGNTDRHSIKKNLIGALLFDSGETAEATRLKRTARRRYTRRKNRICYLQEIFSNEMAKVDDSFFHRLEESFLVEEDKKHERHPIFGNIVDEVAYHEKYPTIYHLRKKLVDSTDKADLRLIYLALAHMIKFRGHFLIEGDLNPDNSDVDKLFIQLVQTYNQLFEENPINASGVDAKAILSARLSKSRRLENLIAQLPGEKKNGLFGNLIALSLGLTPNFKSNFDLAEDAKLQLSKDTYDDDLDNLLAQIGDQYADLFLAAKNLSDAILLSDILRVNTEITKAPLSASMIKRYDEHHQDLTLLKALVRQQLPEKYKEIFFDQSKNGYAGYIDGGASQEEFYKFIKPILEKMDGTEELLVKLNREDLLRKQRTFDNGSIPHQIHLGELHAILRRQEDFYPFLKDNREKIEKILTFRIPYYVGPLARGNSRFAWMTRKSEETITPWNFEEVVDKGASAQSFIERMTNFDKNLPNEKVLPKHSLLYEYFTVYNELTKVKYVTEGMRKPAFLSGEQKKAIVDLLFKTNRKVTVKQLKEDYFKKIECFDSVEISGVEDRFNASLGTYHDLLKIIKDKDFLDNEENEDILEDIVLTLTLFEDREMIEERLKTYAHLFDDKVMKQLKRRRYTGWGRLSRKLINGIRDKQSGKTILDFLKSDGFANRNFMQLIHDDSLTFKEDIQKAQVSGQGDSLHEHIANLAGSPAIKKGILQTVKVVDELVKVMGRHKPENIVIEMARENQTTQKGQKNSRERMKRIEEGIKELGSQILKEHPVENTQLQNEKLYLYYLQNGRDMYVDQELDINRLSDYDVDHIVPQSFLKDDSIDNKVLTRSDKNRGKSDNVPSEEVVKKMKNYWRQLLNAKLITQRKFDNLTKAERGGLSELDKAGFIKRQLVETRQITKHVAQILDSRMNTKYDENDKLIREVKVITLKSKLVSDFRKDFQFYKVREINNYHHAHDAYLNAVVGTALIKKYPKLESEFVYGDYKVYDVRKMIAKSEQEIGKATAKYFFYSNIMNFFKTEITLANGSSGSETPGTSESATPESSGSEVEFSHEYWMRHALTLAKRARDEREVPVGAVLVLNNRVIGEGWNRAIGLHDPTAHAEIMALRQGGLVMQNYRLIDATLYVTFEPCVMCAGAMIHSRIGRVVFGVRNAKTGAAGSLMDVLHYPGMNHRVEITEGILADECAALLCYFFRMPRQVFNAQKKAQSSTDGEIRKRPLIETNGETGEIVWDKGRDFATVRKVLSMPQVNIVKKTEVQTGGFSKESILPKRNSDKLIARKKDWDPKKYGGFDSPTVAYSVLVVAKVEKGKSKKLKSVKELLGITIMERSSFEKNPIDFLEAKGYKEVKKDLIIKLPKYSLFELENGRKRMLASAGELQKGNELALPSKYVNFLYLASHYEKLKGSPEDNEQKQLFVEQHKHYLDEIIEQISEFSKRVILADANLDKVLSAYNKHRDKPIREQAENIIHLFTLTNLGAPAAFKYFDTTIDRKRYTSTKEVLDATLIHQSITGLYETRIDLSQLGGD

SEQ ID NO: 270 - protein, 1554 aa, synthetic construct
  REGION 1..1554: note = 108 Cas9 TadAins 1026 polypeptide sequence
MDKKYSIGLAIGTNSVGWAVITDEYKVPSKKFKVLGNTDRHSIKKNLIGALLFDSGETAEATRLKRTARRRYTRRKNRICYLQEIFSNEMAKVDDSFFHRLEESFLVEEDKKHERHPIFGNIVDEVAYHEKYPTIYHLRKKLVDSTDKADLRLIYLALAHMIKFRGHFLIEGDLNPDNSDVDKLFIQLVQTYNQLFEENPINASGVDAKAILSARLSKSRRLENLIAQLPGEKKNGLFGNLIALSLGLTPNFKSNFDLAEDAKLQLSKDTYDDDLDNLLAQIGDQYADLFLAAKNLSDAILLSDILRVNTEITKAPLSASMIKRYDEHHQDLTLLKALVRQQLPEKYKEIFFDQSKNGYAGYIDGGASQEEFYKFIKPILEKMDGTEELLVKLNREDLLRKQRTFDNGSIPHQIHLGELHAILRRQEDFYPFLKDNREKIEKILTFRIPYYVGPLARGNSRFAWMTRKSEETITPWNFEEVVDKGASAQSFIERMTNFDKNLPNEKVLPKHSLLYEYFTVYNELTKVKYVTEGMRKPAFLSGEQKKAIVDLLFKTNRKVTVKQLKEDYFKKIECFDSVEISGVEDRFNASLGTYHDLLKIIKDKDFLDNEENEDILEDIVLTLTLFEDREMIEERLKTYAHLFDDKVMKQLKRRRYTGWGRLSRKLINGIRDKQSGKTILDFLKSDGFANRNFMQLIHDDSLTFKEDIQKAQVSGQGDSLHEHIANLAGSPAIKKGILQTVKVVDELVKVMGRHKPENIVIEMARENQTTQKGQKNSRERMKRIEEGIKELGSQILKEHPVENTQLQNEKLYLYYLQNGRDMYVDQELDINRLSDYDVDHIVPQSFLKDDSIDNKVLTRSDKNRGKSDNVPSEEVVKKMKNYWRQLLNAKLITQRKFDNLTKAERGGLSELDKAGFIKRQLVETRQITKHVAQILDSRMNTKYDENDKLIREVKVITLKSKLVSDFRKDFQFYKVREINNYHHAHDAYLNAVVGTALIKKYPKLESEFVYGDYKVYDVRKMIAKSEGSSGSETPGTSESATPESSGSEVEFSHEYWMRHALTLAKRARDEREVPVGAVLVLNNRVIGEGWNRAIGLHDPTAHAEIMALRQGGLVMQNYRLIDATLYVTFEPCVMCAGAMIHSRIGRVVFGVRNAKTGAAGSLMDVLHYPGMNHRVEITEGILADECAALLCYFFRMPRQVFNAQKKAQSSTDQEIGKATAKYFFYSNIMNFFKTEITLANGEIRKRPLIETNGETGEIVWDKGRDFATVRKVLSMPQVNIVKKTEVQTGGFSKESILPKRNSDKLIARKKDWDPKKYGGFDSPTVAYSVLVVAKVEKGKSKKLKSVKELLGITIMERSSFEKNPIDFLEAKGYKEVKKDLIIKLPKYSLFELENGRKRMLASAGELQKGNELALPSKYVNFLYLASHYEKLKGSPEDNEQKQLFVEQHKHYLDEIIEQISEFSKRVILADANLDKVLSAYNKHRDKPIREQAENIIHLFTLTNLGAPAAFKYFDTTIDRKRYTSTKEVLDATLIHQSITGLYETRIDLSQLGGD

SEQ ID NO: 271 - protein, 1540 aa, synthetic construct
  REGION 1..1540: note = 109 Cas9 TadAins 768 polypeptide sequence
MDKKYSIGLAIGTNSVGWAVITDEYKVPSKKFKVLGNTDRHSIKKNLIGALLFDSGETAEATRLKRTARRRYTRRKNRICYLQEIFSNEMAKVDDSFFHRLEESFLVEEDKKHERHPIFGNIVDEVAYHEKYPTIYHLRKKLVDSTDKADLRLIYLALAHMIKFRGHFLIEGDLNPDNSDVDKLFIQLVQTYNQLFEENPINASGVDAKAILSARLSKSRRLENLIAQLPGEKKNGLFGNLIALSLGLTPNFKSNFDLAEDAKLQLSKDTYDDDLDNLLAQIGDQYADLFLAAKNLSDAILLSDILRVNTEITKAPLSASMIKRYDEHHQDLTLLKALVRQQLPEKYKEIFFDQSKNGYAGYIDGGASQEEFYKFIKPILEKMDGTEELLVKLNREDLLRKQRTFDNGSIPHQIHLGELHAILRRQEDFYPFLKDNREKIEKILTFRIPYYVGPLARGNSRFAWMTRKSEETITPWNFEEVVDKGASAQSFIERMTNFDKNLPNEKVLPKHSLLYEYFTVYNELTKVKYVTEGMRKPAFLSGEQKKAIVDLLFKTNRKVTVKQLKEDYFKKIECFDSVEISGVEDRFNASLGTYHDLLKIIKDKDFLDNEENEDILEDIVLTLTLFEDREMIEERLKTYAHLFDDKVMKQLKRRRYTGWGRLSRKLINGIRDKQSGKTILDFLKSDGFANRNFMQLIHDDSLTFKEDIQKAQVSGQGDSLHEHIANLAGSPAIKKGILQTVKVVDELVKVMGRHKPENIVIEMARENQGSSGSETPGTSESATPESSGSEVEFSHEYWMRHALTLAKRARDEREVPVGAVLVLNNRVIGEGWNRAIGLHDPTAHAEIMALRQGGLVMQNYRLIDATLYVTFEPCVMCAGAMIHSRIGRVVFGVRNAKTGAAGSLMDVLHYPGMNHRVEITEGILADECAALLCYFFRMPRTTQKGQKNSRERMKRIEEGIKELGSQILKEHPVENTQLQNEKLYLYYLQNGRDMYVDQELDINRLSDYDVDHIVPQSFLKDDSIDNKVLTRSDKNRGKSDNVPSEEVVKKMKNYWRQLLNAKLITQRKFDNLTKAERGGLSELDKAGFIKRQLVETRQITKHVAQILDSRMNTKYDENDKLIREVKVITLKSKLVSDFRKDFQFYKVREINNYHHAHDAYLNAVVGTALIKKYPKLESEFVYGDYKVYDVRKMIAKSEQEIGKATAKYFFYSNIMNFFKTEITLANGEIRKRPLIETNGETGEIVWDKGRDFATVRKVLSMPQVNIVKKTEVQTGGFSKESILPKRNSDKLIARKKDWDPKKYGGFDSPTVAYSVLVVAKVEKGKSKKLKSVKELLGITIMERSSFEKNPIDFLEAKGYKEVKKDLIIKLPKYSLFELENGRKRMLASAGELQKGNELALPSKYVNFLYLASHYEKLKGSPEDNEQKQLFVEQHKHYLDEIIEQISEFSKRVILADANLDKVLSAYNKHRDKPIREQAENIIHLFTLTNLGAPAAFKYFDTTIDRKRYTSTKEVLDATLIHQSITGLYETRIDLSQLGGD

SEQ ID NO: 272 - protein, 1540 aa, synthetic construct
  REGION 1..1540: note = 110.1 Cas9 TadAins 1250 polypeptide sequence
MDKKYSIGLAIGTNSVGWAVITDEYKVPSKKFKVLGNTDRHSIKKNLIGALLFDSGETAEATRLKRTARRRYTRRKNRICYLQEIFSNEMAKVDDSFFHRLEESFLVEEDKKHERHPIFGNIVDEVAYHEKYPTIYHLRKKLVDSTDKADLRLIYLALAHMIKFRGHFLIEGDLNPDNSDVDKLFIQLVQTYNQLFEENPINASGVDAKAILSARLSKSRRLENLIAQLPGEKKNGLFGNLIALSLGLTPNFKSNFDLAEDAKLQLSKDTYDDDLDNLLAQIGDQYADLFLAAKNLSDAILLSDILRVNTEITKAPLSASMIKRYDEHHQDLTLLKALVRQQLPEKYKEIFFDQSKNGYAGYIDGGASQEEFYKFIKPILEKMDGTEELLVKLNREDLLRKQRTFDNGSIPHQIHLGELHAILRRQEDFYPFLKDNREKIEKILTFRIPYYVGPLARGNSRFAWMTRKSEETITPWNFEEVVDKGASAQSFIERMTNFDKNLPNEKVLPKHSLLYEYFTVYNELTKVKYVTEGMRKPAFLSGEQKKAIVDLLFKTNRKVTVKQLKEDYFKKIECFDSVEISGVEDRFNASLGTYHDLLKIIKDKDFLDNEENEDILEDIVLTLTLFEDREMIEERLKTYAHLFDDKVMKQLKRRRYTGWGRLSRKLINGIRDKQSGKTILDFLKSDGFANRNFMQLIHDDSLTFKEDIQKAQVSGQGDSLHEHIANLAGSPAIKKGILQTVKVVDELVKVMGRHKPENIVIEMARENQTTQKGQKNSRERMKRIEEGIKELGSQILKEHPVENTQLQNEKLYLYYLQNGRDMYVDQELDINRLSDYDVDHIVPQSFLKDDSIDNKVLTRSDKNRGKSDNVPSEEVVKKMKNYWRQLLNAKLITQRKFDNLTKAERGGLSELDKAGFIKRQLVETRQITKHVAQILDSRMNTKYDENDKLIREVKVITLKSKLVSDFRKDFQFYKVREINNYHHAHDAYLNAVVGTALIKKYPKLESEFVYGDYKVYDVRKMIAKSEQEIGKATAKYFFYSNIMNFFKTEITLANGEIRKRPLIETNGETGEIVWDKGRDFATVRKVLSMPQVNIVKKTEVQTGGFSKESILPKRNSDKLIARKKDWDPKKYGGFDSPTVAYSVLVVAKVEKGKSKKLKSVKELLGITIMERSSFEKNPIDFLEAKGYKEVKKDLIIKLPKYSLFELENGRKRMLASAGELQKGNELALPSKYVNFLYLASHYEKLKGSPGSSGSETPGTSESATPESSGSEVEFSHEYWMRHALTLAKRARDEREVPVGAVLVLNNRVIGEGWNRAIGLHDPTAHAEIMALRQGGLVMQNYRLIDATLYVTFEPCVMCAGAMIHSRIGRVVFGVRNAKTGAAGSLMDVLHYPGMNHRVEITEGILADECAALLCYFFRMPREDNEQKQLFVEQHKHYLDEIIEQISEFSKRVILADANLDKVLSAYNKHRDKPIREQAENIIHLFTLTNLGAPAAFKYFDTTIDRKRYTSTKEVLDATLIHQSITGLYETRIDLSQLGGD

SEQ ID NO: 273 - protein, 1543 aa, synthetic construct
  REGION 1..1543: note = 110.2 Cas9 TadAins 1250 polypeptide sequence
MDKKYSIGLAIGTNSVGWAVITDEYKVPSKKFKVLGNTDRHSIKKNLIGALLFDSGETAEATRLKRTARRRYTRRKNRICYLQEIFSNEMAKVDDSFFHRLEESFLVEEDKKHERHPIFGNIVDEVAYHEKYPTIYHLRKKLVDSTDKADLRLIYLALAHMIKFRGHFLIEGDLNPDNSDVDKLFIQLVQTYNQLFEENPINASGVDAKAILSARLSKSRRLENLIAQLPGEKKNGLFGNLIALSLGLTPNFKSNFDLAEDAKLQLSKDTYDDDLDNLLAQIGDQYADLFLAAKNLSDAILLSDILRVNTEITKAPLSASMIKRYDEHHQDLTLLKALVRQQLPEKYKEIFFDQSKNGYAGYIDGGASQEEFYKFIKPILEKMDGTEELLVKLNREDLLRKQRTFDNGSIPHQIHLGELHAILRRQEDFYPFLKDNREKIEKILTFRIPYYVGPLARGNSRFAWMTRKSEETITPWNFEEVVDKGASAQSFIERMTNFDKNLPNEKVLPKHSLLYEYFTVYNELTKVKYVTEGMRKPAFLSGEQKKAIVDLLFKTNRKVTVKQLKEDYFKKIECFDSVEISGVEDRFNASLGTYHDLLKIIKDKDFLDNEENEDILEDIVLTLTLFEDREMIEERLKTYAHLFDDKVMKQLKRRRYTGWGRLSRKLINGIRDKQSGKTILDFLKSDGFANRNFMQLIHDDSLTFKEDIQKAQVSGQGDSLHEHIANLAGSPAIKKGILQTVKVVDELVKVMGRHKPENIVIEMARENQTTQKGQKNSRERMKRIEEGIKELGSQILKEHPVENTQLQNEKLYLYYLQNGRDMYVDQELDINRLSDYDVDHIVPQSFLKDDSIDNKVLTRSDKNRGKSDNVPSEEVVKKMKNYWRQLLNAKLITQRKFDNLTKAERGGLSELDKAGFIKRQLVETRQITKHVAQILDSRMNTKYDENDKLIREVKVITLKSKLVSDFRKDFQFYKVREINNYHHAHDAYLNAVVGTALIKKYPKLESEFVYGDYKVYDVRKMIAKSEQEIGKATAKYFFYSNIMNFFKTEITLANGEIRKRPLIETNGETGEIVWDKGRDFATVRKVLSMPQVNIVKKTEVQTGGFSKESILPKRNSDKLIARKKDWDPKKYGGFDSPTVAYSVLVVAKVEKGKSKKLKSVKELLGITIMERSSFEKNPIDFLEAKGYKEVKKDLIIKLPKYSLFELENGRKRMLASAGELQKGNELALPSKYVNFLYLASHYEKLKGSPGSSGSSGSETPGTSESATPESSGSEVEFSHEYWMRHALTLAKRARDEREVPVGAVLVLNNRVIGEGWNRAIGLHDPTAHAEIMALRQGGLVMQNYRLIDATLYVTFEPCVMCAGAMIHSRIGRVVFGVRNAKTGAAGSLMDVLHYPGMNHRVEITEGILADECAALLCYFFRMPREDNEQKQLFVEQHKHYLDEIIEQISEFSKRVILADANLDKVLSAYNKHRDKPIREQAENIIHLFTLTNLGAPAAFKYFDTTIDRKRYTSTKEVLDATLIHQSITGLYETRIDLSQLGGD

SEQ ID NO: 274 - protein, 1546 aa, synthetic construct
  REGION 1..1546: note = 110.3 Cas9 TadAins 1250 polypeptide sequence
MDKKYSIGLAIGTNSVGWAVITDEYKVPSKKFKVLGNTDRHSIKKNLIGALLFDSGETAEATRLKRTARRRYTRRKNRICYLQEIFSNEMAKVDDSFFHRLEESFLVEEDKKHERHPIFGNIVDEVAYHEKYPTIYHLRKKLVDSTDKADLRLIYLALAHMIKFRGHFLIEGDLNPDNSDVDKLFIQLVQTYNQLFEENPINASGVDAKAILSARLSKSRRLENLIAQLPGEKKNGLFGNLIALSLGLTPNFKSNFDLAEDAKLQLSKDTYDDDLDNLLAQIGDQYADLFLAAKNLSDAILLSDILRVNTEITKAPLSASMIKRYDEHHQDLTLLKALVRQQLPEKYKEIFFDQSKNGYAGYIDGGASQEEFYKFIKPILEKMDGTEELLVKLNREDLLRKQRTFDNGSIPHQIHLGELHAILRRQEDFYPFLKDNREKIEKILTFRIPYYVGPLARGNSRFAWMTRKSEETITPWNFEEVVDKGASAQSFIERMTNFDKNLPNEKVLPKHSLLYEYFTVYNELTKVKYVTEGMRKPAFLSGEQKKAIVDLLFKTNRKVTVKQLKEDYFKKIECFDSVEISGVEDRFNASLGTYHDLLKIIKDKDFLDNEENEDILEDIVLTLTLFEDREMIEERLKTYAHLFDDKVMKQLKRRRYTGWGRLSRKLINGIRDKQSGKTILDFLKSDGFANRNFMQLIHDDSLTFKEDIQKAQVSGQGDSLHEHIANLAGSPAIKKGILQTVKVVDELVKVMGRHKPENIVIEMARENQTTQKGQKNSRERMKRIEEGIKELGSQILKEHPVENTQLQNEKLYLYYLQNGRDMYVDQELDINRLSDYDVDHIVPQSFLKDDSIDNKVLTRSDKNRGKSDNVPSEEVVKKMKNYWRQLLNAKLITQRKFDNLTKAERGGLSELDKAGFIKRQLVETRQITKHVAQILDSRMNTKYDENDKLIREVKVITLKSKLVSDFRKDFQFYKVREINNYHHAHDAYLNAVVGTALIKKYPKLESEFVYGDYKVYDVRKMIAKSEQEIGKATAKYFFYSNIMNFFKTEITLANGEIRKRPLIETNGETGEIVWDKGRDFATVRKVLSMPQVNIVKKTEVQTGGFSKESILPKRNSDKLIARKKDWDPKKYGGFDSPTVAYSVLVVAKVEKGKSKKLKSVKELLGITIMERSSFEKNPIDFLEAKGYKEVKKDLIIKLPKYSLFELENGRKRMLASAGELQKGNELALPSKYVNFLYLASHYEKLKGSPGSSGSSGSETPGTSESATPESGSSSGSEVEFSHEYWMRHALTLAKRARDEREVPVGAVLVLNNRVIGEGWNRAIGLHDPTAHAEIMALRQGGLVMQNYRLIDATLYVTFEPCVMCAGAMIHSRIGRVVFGVRNAKTGAAGSLMDVLHYPGMNHRVEITEGILADECAALLCYFFRMPREDNEQKQLFVEQHKHYLDEIIEQISEFSKRVILADANLDKVLSAYNKHRDKPIREQAENIIHLFTLTNLGAPAAFKYFDTTIDRKRYTSTKEVLDATLIHQSITGLYETRIDLSQLGGD

SEQ ID NO: 275 - protein, 1546 aa, synthetic construct
  REGION 1..1546: note = 110.4 Cas9 TadAins 1250 polypeptide sequence
MDKKYSIGLAIGTNSVGWAVITDEYKVPSKKFKVLGNTDRHSIKKNLIGALLFDSGETAEATRLKRTARRRYTRRKNRICYLQEIFSNEMAKVDDSFFHRLEESFLVEEDKKHERHPIFGNIVDEVAYHEKYPTIYHLRKKLVDSTDKADLRLIYLALAHMIKFRGHFLIEGDLNPDNSDVDKLFIQLVQTYNQLFEENPINASGVDAKAILSARLSKSRRLENLIAQLPGEKKNGLFGNLIALSLGLTPNFKSNFDLAEDAKLQLSKDTYDDDLDNLLAQIGDQYADLFLAAKNLSDAILLSDILRVNTEITKAPLSASMIKRYDEHHQDLTLLKALVRQQLPEKYKEIFFDQSKNGYAGYIDGGASQEEFYKFIKPILEKMDGTEELLVKLNREDLLRKQRTFDNGSIPHQIHLGELHAILRRQEDFYPFLKDNREKIEKILTFRIPYYVGPLARGNSRFAWMTRKSEETITPWNFEEVVDKGASAQSFIERMTNFDKNLPNEKVLPKHSLLYEYFTVYNELTKVKYVTEGMRKPAFLSGEQKKAIVDLLFKTNRKVTVKQLKEDYFKKIECFDSVEISGVEDRFNASLGTYHDLLKIIKDKDFLDNEENEDILEDIVLTLTLFEDREMIEERLKTYAHLFDDKVMKQLKRRRYTGWGRLSRKLINGIRDKQSGKTILDFLKSDGFANRNFMQLIHDDSLTFKEDIQKAQVSGQGDSLHEHIANLAGSPAIKKGILQTVKVVDELVKVMGRHKPENIVIEMARENQTTQKGQKNSRERMKRIEEGIKELGSQILKEHPVENTQLQNEKLYLYYLQNGRDMYVDQELDINRLSDYDVDHIVPQSFLKDDSIDNKVLTRSDKNRGKSDNVPSEEVVKKMKNYWRQLLNAKLITQRKFDNLTKAERGGLSELDKAGFIKRQLVETRQITKHVAQILDSRMNTKYDENDKLIREVKVITLKSKLVSDFRKDFQFYKVREINNYHHAHDAYLNAVVGTALIKKYPKLESEFVYGDYKVYDVRKMIAKSEQEIGKATAKYFFYSNIMNFFKTEITLANGEIRKRPLIETNGETGEIVWDKGRDFATVRKVLSMPQVNIVKKTEVQTGGFSKESILPKRNSDKLIARKKDWDPKKYGGFDSPTVAYSVLVVAKVEKGKSKKLKSVKELLGITIMERSSFEKNPIDFLEAKGYKEVKKDLIIKLPKYSLFELENGRKRMLASAGELQKGNELALPSKYVNFLYLASHYEKLKGSPGSSGSSGSETPGTSESATPESGSSSGSEVEFSHEYWMRHALTLAKRARDEREVPVGAVLVLNNRVIGEGWNRAIGLHDPTAHAEIMALRQGGLVMQNYRLIDATLYVTFEPCVMCAGAMIHSRIGRVVFGVRNAKTGAAGSLMDVLHYPGMNHRVEITEGILADECAALLCYFFRMRREDNEQKQLFVEQHKHYLDEIIEQISEFSKRVILADANLDKVLSAYNKHRDKPIREQAENIIHLFTLTNLGAPAAFKYFDTTIDRKRYTSTKEVLDATLIHQSITGLYETRIDLSQLGGD

SEQ ID NO: 276 - protein, 1546 aa, synthetic construct
  REGION 1..1546: note = 110.5 Cas9 TadAins 1249 polypeptide sequence
MDKKYSIGLAIGTNSVGWAVITDEYKVPSKKFKVLGNTDRHSIKKNLIGALLFDSGETAEATRLKRTARRRYTRRKNRICYLQEIFSNEMAKVDDSFFHRLEESFLVEEDKKHERHPIFGNIVDEVAYHEKYPTIYHLRKKLVDSTDKADLRLIYLALAHMIKFRGHFLIEGDLNPDNSDVDKLFIQLVQTYNQLFEENPINASGVDAKAILSARLSKSRRLENLIAQLPGEKKNGLFGNLIALSLGLTPNFKSNFDLAEDAKLQLSKDTYDDDLDNLLAQIGDQYADLFLAAKNLSDAILLSDILRVNTEITKAPLSASMIKRYDEHHQDLTLLKALVRQQLPEKYKEIFFDQSKNGYAGYIDGGASQEEFYKFIKPILEKMDGTEELLVKLNREDLLRKQRTFDNGSIPHQIHLGELHAILRRQEDFYPFLKDNREKIEKILTFRIPYYVGPLARGNSRFAWMTRKSEETITPWNFEEVVDKGASAQSFIERMTNFDKNLPNEKVLPKHSLLYEYFTVYNELTKVKYVTEGMRKPAFLSGEQKKAIVDLLFKTNRKVTVKQLKEDYFKKIECFDSVEISGVEDRFNASLGTYHDLLKIIKDKDFLDNEENEDILEDIVLTLTLFEDREMIEERLKTYAHLFDDKVMKQLKRRRYTGWGRLSRKLINGIRDKQSGKTILDFLKSDGFANRNFMQLIHDDSLTFKEDIQKAQVSGQGDSLHEHIANLAGSPAIKKGILQTVKVVDELVKVMGRHKPENIVIEMARENQTTQKGQKNSRERMKRIEEGIKELGSQILKEHPVENTQLQNEKLYLYYLQNGRDMYVDQELDINRLSDYDVDHIVPQSFLKDDSIDNKVLTRSDKNRGKSDNVPSEEVVKKMKNYWRQLLNAKLITQRKFDNLTKAERGGLSELDKAGFIKRQLVETRQITKHVAQILDSRMNTKYDENDKLIREVKVITLKSKLVSDFRKDFQFYKVREINNYHHAHDAYLNAVVGTALIKKYPKLESEFVYGDYKVYDVRKMIAKSEQEIGKATAKYFFYSNIMNFFKTEITLANGEIRKRPLIETNGETGEIVWDKGRDFATVRKVLSMPQVNIVKKTEVQTGGFSKESILPKRNSDKLIARKKDWDPKKYGGFDSPTVAYSVLVVAKVEKGKSKKLKSVKELLGITIMERSSFEKNPIDFLEAKGYKEVKKDLIIKLPKYSLFELENGRKRMLASAGELQKGNELALPSKYVNFLYLASHYEKLKGSGSSGSSGSETPGTSESATPESGSSSGSEVEFSHEYWMRHALTLAKRARDEREVPVGAVLVLNNRVIGEGWNRAIGLHDPTAHAEIMALRQGGLVMQNYRLIDATLYVTFEPCVMCAGAMIHSRIGRVVFGVRNAKTGAAGSLMDVLHYPGMNHRVEITEGILADECAALLCYFFRMRRPEDNEQKQLFVEQHKHYLDEIIEQISEFSKRVILADANLDKVLSAYNKHRDKPIREQAENIIHLFTLTNLGAPAAFKYFDTTIDRKRYTSTKEVLDATLIHQSITGLYETRIDLSQLGGD

SEQ ID NO: 277 - protein, 1551 aa, synthetic construct
  REGION 1..1551: note = 110.5 Cas9 TadAins delta59-66 1250 polypeptide sequence
MDKKYSIGLAIGTNSVGWAVITDEYKVPSKKFKVLGNTDRHSIKKNLIGALLFDSGETAEATRLKRTARRRYTRRKNRICYLQEIFSNEMAKVDDSFFHRLEESFLVEEDKKHERHPIFGNIVDEVAYHEKYPTIYHLRKKLVDSTDKADLRLIYLALAHMIKFRGHFLIEGDLNPDNSDVDKLFIQLVQTYNQLFEENPINASGVDAKAILSARLSKSRRLENLIAQLPGEKKNGLFGNLIALSLGLTPNFKSNFDLAEDAKLQLSKDTYDDDLDNLLAQIGDQYADLFLAAKNLSDAILLSDILRVNTEITKAPLSASMIKRYDEHHQDLTLLKALVRQQLPEKYKEIFFDQSKNGYAGYIDGGASQEEFYKFIKPILEKMDGTEELLVKLNREDLLRKQRTFDNGSIPHQIHLGELHAILRRQEDFYPFLKDNREKIEKILTFRIPYYVGPLARGNSRFAWMTRKSEETITPWNFEEVVDKGASAQSFIERMTNFDKNLPNEKVLPKHSLLYEYFTVYNELTKVKYVTEGMRKPAFLSGEQKKAIVDLLFKTNRKVTVKQLKEDYFKKIECFDSVEISGVEDRFNASLGTYHDLLKIIKDKDFLDNEENEDILEDIVLTLTLFEDREMIEERLKTYAHLFDDKVMKQLKRRRYTGWGRLSRKLINGIRDKQSGKTILDFLKSDGFANRNFMQLIHDDSLTFKEDIQKAQVSGQGDSLHEHIANLAGSPAIKKGILQTVKVVDELVKVMGRHKPENIVIEMARENQTTQKGQKNSRERMKRIEEGIKELGSQILKEHPVENTQLQNEKLYLYYLQNGRDMYVDQELDINRLSDYDVDHIVPQSFLKDDSIDNKVLTRSDKNRGKSDNVPSEEVVKKMKNYWRQLLNAKLITQRKFDNLTKAERGGLSELDKAGFIKRQLVETRQITKHVAQILDSRMNTKYDENDKLIREVKVITLKSKLVSDFRKDFQFYKVREINNYHHAHDAYLNAVVGTALIKKYPKLESEFVYGDYKVYDVRKMIAKSEQEIGKATAKYFFYSNIMNFFKTEITLANGEIRKRPLIETNGETGEIVWDKGRDFATVRKVLSMPQVNIVKKTEVQTGGFSKESILPKRNSDKLIARKKDWDPKKYGGFDSPTVAYSVLVVAKVEKGKSKKLKSVKELLGITIMERSSFEKNPIDFLEAKGYKEVKKDLIIKLPKYSLFELENGRKRMLASAGELQKGNELALPSKYVNFLYLASHYEKLKGSPGSSGSSGSETPGTSESATPESGSSGSEVEFSHEYWMRHALTLAKRARDEREVPVGAVLVLNNRVIGEGWNRAHAEIMALRQGGLVMQNYRLIDATLYVTFEPCVMCAGAMIHSRIGRVVFGVRNAKTGAAGSLMDVLHYPGMNHRVEITEGILADECAALLCYFFRMPRQVFNAQKKAQSSTDEDNEQKQLFVEQHKHYLDEIIEQISEFSKRVILADANLDKVLSAYNKHRDKPIREQAENIIHLFTLTNLGAPAAFKYFDTTIDRKRYTSTKEVLDATLIHQSITGLYETRIDLSQLGGD

SEQ ID NO: 278 - protein, 1546 aa, synthetic construct
  REGION 1..1546: note = 110.6 Cas9 TadAins 1251 polypeptide sequence
MDKKYSIGLAIGTNSVGWAVITDEYKVPSKKFKVLGNTDRHSIKKNLIGALLFDSGETAEATRLKRTARRRYTRRKNRICYLQEIFSNEMAKVDDSFFHRLEESFLVEEDKKHERHPIFGNIVDEVAYHEKYPTIYHLRKKLVDSTDKADLRLIYLALAHMIKFRGHFLIEGDLNPDNSDVDKLFIQLVQTYNQLFEENPINASGVDAKAILSARLSKSRRLENLIAQLPGEKKNGLFGNLIALSLGLTPNFKSNFDLAEDAKLQLSKDTYDDDLDNLLAQIGDQYADLFLAAKNLSDAILLSDILRVNTEITKAPLSASMIKRYDEHHQDLTLLKALVRQQLPEKYKEIFFDQSKNGYAGYIDGGASQEEFYKFIKPILEKMDGTEELLVKLNREDLLRKQRTFDNGSIPHQIHLGELHAILRRQEDFYPFLKDNREKIEKILTFRIPYYVGPLARGNSRFAWMTRKSEETITPWNFEEVVDKGASAQSFIERMTNFDKNLPNEKVLPKHSLLYEYFTVYNELTKVKYVTEGMRKPAFLSGEQKKAIVDLLFKTNRKVTVKQLKEDYFKKIECFDSVEISGVEDRFNASLGTYHDLLKIIKDKDFLDNEENEDILEDIVLTLTLFEDREMIEERLKTYAHLFDDKVMKQLKRRRYTGWGRLSRKLINGIRDKQSGKTILDFLKSDGFANRNFMQLIHDDSLTFKEDIQKAQVSGQGDSLHEHIANLAGSPAIKKGILQTVKVVDELVKVMGRHKPENIVIEMARENQTTQKGQKNSRERMKRIEEGIKELGSQILKEHPVENTQLQNEKLYLYYLQNGRDMYVDQELDINRLSDYDVDHIVPQSFLKDDSIDNKVLTRSDKNRGKSDNVPSEEVVKKMKNYWRQLLNAKLITQRKFDNLTKAERGGLSELDKAGFIKRQLVETRQITKHVAQILDSRMNTKYDENDKLIREVKVITLKSKLVSDFRKDFQFYKVREINNYHHAHDAYLNAVVGTALIKKYPKLESEFVYGDYKVYDVRKMIAKSEQEIGKATAKYFFYSNIMNFFKTEITLANGEIRKRPLIETNGETGEIVWDKGRDFATVRKVLSMPQVNIVKKTEVQTGGFSKESILPKRNSDKLIARKKDWDPKKYGGFDSPTVAYSVLVVAKVEKGKSKKLKSVKELLGITIMERSSFEKNPIDFLEAKGYKEVKKDLIIKLPKYSLFELENGRKRMLASAGELQKGNELALPSKYVNFLYLASHYEKLKGSPEGSSGSSGSETPGTSESATPESGSSSGSEVEFSHEYWMRHALTLAKRARDEREVPVGAVLVLNNRVIGEGWNRAIGLHDPTAHAEIMALRQGGLVMQNYRLIDATLYVTFEPCVMCAGAMIHSRIGRVVFGVRNAKTGAAGSLMDVLHYPGMNHRVEITEGILADECAALLCYFFRMRRDNEQKQLFVEQHKHYLDEIIEQISEFSKRVILADANLDKVLSAYNKHRDKPIREQAENIIHLFTLTNLGAPAAFKYFDTTIDRKRYTSTKEVLDATLIHQSITGLYETRIDLSQLGGD

SEQ ID NO: 279 - protein, 1546 aa, synthetic construct
  REGION 1..1546: note = 110.7 Cas9 TadAins 1252 polypeptide sequence
MDKKYSIGLAIGTNSVGWAVITDEYKVPSKKFKVLGNTDRHSIKKNLIGALLFDSGETAEATRLKRTARRRYTRRKNRICYLQEIFSNEMAKVDDSFFHRLEESFLVEEDKKHERHPIFGNIVDEVAYHEKYPTIYHLRKKLVDSTDKADLRLIYLALAHMIKFRGHFLIEGDLNPDNSDVDKLFIQLVQTYNQLFEENPINASGVDAKAILSARLSKSRRLENLIAQLPGEKKNGLFGNLIALSLGLTPNFKSNFDLAEDAKLQLSKDTYDDDLDNLLAQIGDQYADLFLAAKNLSDAILLSDILRVNTEITKAPLSASMIKRYDEHHQDLTLLKALVRQQLPEKYKEIFFDQSKNGYAGYIDGGASQEEFYKFIKPILEKMDGTEELLVKLNREDLLRKQRTFDNGSIPHQIHLGELHAILRRQEDFYPFLKDNREKIEKILTFRIPYYVGPLARGNSRFAWMTRKSEETITPWNFEEVVDKGASAQSFIERMTNFDKNLPNEKVLPKHSLLYEYFTVYNELTKVKYVTEGMRKPAFLSGEQKKAIVDLLFKTNRKVTVKQLKEDYFKKIECFDSVEISGVEDRFNASLGTYHDLLKIIKDKDFLDNEENEDILEDIVLTLTLFEDREMIEERLKTYAHLFDDKVMKQLKRRRYTGWGRLSRKLINGIRDKQSGKTILDFLKSDGFANRNFMQLIHDDSLTFKEDIQKAQVSGQGDSLHEHIANLAGSPAIKKGILQTVKVVDELVKVMGRHKPENIVIEMARENQTTQKGQKNSRERMKRIEEGIKELGSQILKEHPVENTQLQNEKLYLYYLQNGRDMYVDQELDINRLSDYDVDHIVPQSFLKDDSIDNKVLTRSDKNRGKSDNVPSEEVVKKMKNYWRQLLNAKLITQRKFDNLTKAERGGLSELDKAGFIKRQLVETRQITKHVAQILDSRMNTKYDENDKLIREVKVITLKSKLVSDFRKDFQFYKVREINNYHHAHDAYLNAVVGTALIKKYPKLESEFVYGDYKVYDVRKMIAKSEQEIGKATAKYFFYSNIMNFFKTEITLANGEIRKRPLIETNGETGEIVWDKGRDFATVRKVLSMPQVNIVKKTEVQTGGFSKESILPKRNSDKLIARKKDWDPKKYGGFDSPTVAYSVLVVAKVEKGKSKKLKSVKELLGITIMERSSFEKNPIDFLEAKGYKEVKKDLIIKLPKYSLFELENGRKRMLASAGELQKGNELALPSKYVNFLYLASHYEKLKGSPEDGSSGSSGSETPGTSESATPESGSSSGSEVEFSHEYWMRHALTLAKRARDEREVPVGAVLVLNNRVIGEGWNRAIGLHDPTAHAEIMALRQGGLVMQNYRLIDATLYVTFEPCVMCAGAMIHSRIGRVVFGVRNAKTGAAGSLMDVLHYPGMNHRVEITEGILADECAALLCYFFRMRRNEQKQLFVEQHKHYLDEIIEQISEFSKRVILADANLDKVLSAYNKHRDKPIREQAENIIHLFTLTNLGAPAAFKYFDTTIDRKRYTSTKEVLDATLIHQSITGLYETRIDLSQLGGD

SEQ ID NO: 280 - protein, 1533 aa, synthetic construct
  REGION 1..1533: note = 110.8 Cas9 TadAins delta59-66 C-truncate 1250 polypeptide sequence
MDKKYSIGLAIGTNSVGWAVITDEYKVPSKKFKVLGNTDRHSIKKNLIGALLFDSGETAEATRLKRTARRRYTRRKNRICYLQEIFSNEMAKVDDSFFHRLEESFLVEEDKKHERHPIFGNIVDEVAYHEKYPTIYHLRKKLVDSTDKADLRLIYLALAHMIKFRGHFLIEGDLNPDNSDVDKLFIQLVQTYNQLFEENPINASGVDAKAILSARLSKSRRLENLIAQLPGEKKNGLFGNLIALSLGLTPNFKSNFDLAEDAKLQLSKDTYDDDLDNLLAQIGDQYADLFLAAKNLSDAILLSDILRVNTEITKAPLSASMIKRYDEHHQDLTLLKALVRQQLPEKYKEIFFDQSKNGYAGYIDGGASQEEFYKFIKPILEKMDGTEELLVKLNREDLLRKQRTFDNGSIPHQIHLGELHAILRRQEDFYPFLKDNREKIEKILTFRIPYYVGPLARGNSRFAWMTRKSEETITPWNFEEVVDKGASAQSFIERMTNFDKNLPNEKVLPKHSLLYEYFTVYNELTKVKYVTEGMRKPAFLSGEQKKAIVDLLFKTNRKVTVKQLKEDYFKKIECFDSVEISGVEDRFNASLGTYHDLLKIIKDKDFLDNEENEDILEDIVLTLTLFEDREMIEERLKTYAHLFDDKVMKQLKRRRYTGWGRLSRKLINGIRDKQSGKTILDFLKSDGFANRNFMQLIHDDSLTFKEDIQKAQVSGQGDSLHEHIANLAGSPAIKKGILQTVKVVDELVKVMGRHKPENIVIEMARENQTTQKGQKNSRERMKRIEEGIKELGSQILKEHPVENTQLQNEKLYLYYLQNGRDMYVDQELDINRLSDYDVDHIVPQSFLKDDSIDNKVLTRSDKNRGKSDNVPSEEVVKKMKNYWRQLLNAKLITQRKFDNLTKAERGGLSELDKAGFIKRQLVETRQITKHVAQILDSRMNTKYDENDKLIREVKVITLKSKLVSDFRKDFQFYKVREINNYHHAHDAYLNAVVGTALIKKYPKLESEFVYGDYKVYDVRKMIAKSEQEIGKATAKYFFYSNIMNFFKTEITLANGEIRKRPLIETNGETGEIVWDKGRDFATVRKVLSMPQVNIVKKTEVQTGGFSKESILPKRNSDKLIARKKDWDPKKYGGFDSPTVAYSVLVVAKVEKGKSKKLKSVKELLGITIMERSSFEKNPIDFLEAKGYKEVKKDLIIKLPKYSLFELENGRKRMLASAGELQKGNELALPSKYVNFLYLASHYEKLKGSPGSSGSETPGTSESATPESSGSEVEFSHEYWMRHALTLAKRARDEREVPVGAVLVLNNRVIGEGWNRAHAEIMALRQGGLVMQNYRLIDATLYVTFEPCVMCAGAMIHSRIGRVVFGVRNAKTGAAGSLMDVLHYPGMNHRVEITEGILADECAALLCYFFRMPRQEDNEQKQLFVEQHKHYLDEIIEQISEFSKRVILADANLDKVLSAYNKHRDKPIREQAENIIHLFTLTNLGAPAAFKYFDTTIDRKRYTSTKEVLDATLIHQSITGLYETRIDLSQLGGD

SEQ ID NO: 281 - protein, 1549 aa, synthetic construct
  REGION 1..1549: note = 111.1 Cas9 TadAins 997 polypeptide sequence
MDKKYSIGLAIGTNSVGWAVITDEYKVPSKKFKVLGNTDRHSIKKNLIGALLFDSGETAEATRLKRTARRRYTRRKNRICYLQEIFSNEMAKVDDSFFHRLEESFLVEEDKKHERHPIFGNIVDEVAYHEKYPTIYHLRKKLVDSTDKADLRLIYLALAHMIKFRGHFLIEGDLNPDNSDVDKLFIQLVQTYNQLFEENPINASGVDAKAILSARLSKSRRLENLIAQLPGEKKNGLFGNLIALSLGLTPNFKSNFDLAEDAKLQLSKDTYDDDLDNLLAQIGDQYADLFLAAKNLSDAILLSDILRVNTEITKAPLSASMIKRYDEHHQDLTLLKALVRQQLPEKYKEIFFDQSKNGYAGYIDGGASQEEFYKFIKPILEKMDGTEELLVKLNREDLLRKQRTFDNGSIPHQIHLGELHAILRRQEDFYPFLKDNREKIEKILTFRIPYYVGPLARGNSRFAWMTRKSEETITPWNFEEVVDKGASAQSFIERMTNFDKNLPNEKVLPKHSLLYEYFTVYNELTKVKYVTEGMRKPAFLSGEQKKAIVDLLFKTNRKVTVKQLKEDYFKKIECFDSVEISGVEDRFNASLGTYHDLLKIIKDKDFLDNEENEDILEDIVLTLTLFEDREMIEERLKTYAHLFDDKVMKQLKRRRYTGWGRLSRKLINGIRDKQSGKTILDFLKSDGFANRNFMQLIHDDSLTFKEDIQKAQVSGQGDSLHEHIANLAGSPAIKKGILQTVKVVDELVKVMGRHKPENIVIEMARENQTTQKGQKNSRERMKRIEEGIKELGSQILKEHPVENTQLQNEKLYLYYLQNGRDMYVDQELDINRLSDYDVDHIVPQSFLKDDSIDNKVLTRSDKNRGKSDNVPSEEVVKKMKNYWRQLLNAKLITQRKFDNLTKAERGGLSELDKAGFIKRQLVETRQITKHVAQILDSRMNTKYDENDKLIREVKVITLKSKLVSDFRKDFQFYKVREINNYHHAHDAYLNAVVGTALSHEYWMRHALTLAKRARDEREVPVGAVLVLNNRVIGEGWNRAIGLHDPTAHAEIMALRQGGLVMQNYRLIDATLYVTFEPCVMCAGAMIHSRIGRVVFGVRNAKTGAAGSLMDVLHYPGMNHRVEITEGILADECAALLCYFFRMPRQVFNAQKKAQSSTDGSSGSETPGTSESATPESSGIKKYPKLESEFVYGDYKVYDVRKMIAKSEQEIGKATAKYFFYSNIMNFFKTEITLANGEIRKRPLIETNGETGEIVWDKGRDFATVRKVLSMPQVNIVKKTEVQTGGFSKESILPKRNSDKLIARKKDWDPKKYGGFDSPTVAYSVLVVAKVEKGKSKKLKSVKELLGITIMERSSFEKNPIDFLEAKGYKEVKKDLIIKLPKYSLFELENGRKRMLASAGELQKGNELALPSKYVNFLYLASHYEKLKGSPEDNEQKQLFVEQHKHYLDEIIEQISEFSKRVILADANLDKVLSAYNKHRDKPIREQAENIIHLFTLTNLGAPAAFKYFDTTIDRKRYTSTKEVLDATLIHQSITGLYETRIDLSQLGGD

SEQ ID NO: 282 - protein, 1555 aa, synthetic construct
  REGION 1..1555: note = 111.2 Cas9 TadAins 997 polypeptide sequence
MDKKYSIGLAIGTNSVGWAVITDEYKVPSKKFKVLGNTDRHSIKKNLIGALLFDSGETAEATRLKRTARRRYTRRKNRICYLQEIFSNEMAKVDDSFFHRLEESFLVEEDKKHERHPIFGNIVDEVAYHEKYPTIYHLRKKLVDSTDKADLRLIYLALAHMIKFRGHFLIEGDLNPDNSDVDKLFIQLVQTYNQLFEENPINASGVDAKAILSARLSKSRRLENLIAQLPGEKKNGLFGNLIALSLGLTPNFKSNFDLAEDAKLQLSKDTYDDDLDNLLAQIGDQYADLFLAAKNLSDAILLSDILRVNTEITKAPLSASMIKRYDEHHQDLTLLKALVRQQLPEKYKEIFFDQSKNGYAGYIDGGASQEEFYKFIKPILEKMDGTEELLVKLNREDLLRKQRTFDNGSIPHQIHLGELHAILRRQEDFYPFLKDNREKIEKILTFRIPYYVGPLARGNSRFAWMTRKSEETITPWNFEEVVDKGASAQSFIERMTNFDKNLPNEKVLPKHSLLYEYFTVYNELTKVKYVTEGMRKPAFLSGEQKKAIVDLLFKTNRKVTVKQLKEDYFKKIECFDSVEISGVEDRFNASLGTYHDLLKIIKDKDFLDNEENEDILEDIVLTLTLFEDREMIEERLKTYAHLFDDKVMKQLKRRRYTGWGRLSRKLINGIRDKQSGKTILDFLKSDGFANRNFMQLIHDDSLTFKEDIQKAQVSGQGDSLHEHIANLAGSPAIKKGILQTVKVVDELVKVMGRHKPENIVIEMARENQTTQKGQKNSRERMKRIEEGIKELGSQILKEHPVENTQLQNEKLYLYYLQNGRDMYVDQELDINRLSDYDVDHIVPQSFLKDDSIDNKVLTRSDKNRGKSDNVPSEEVVKKMKNYWRQLLNAKLITQRKFDNLTKAERGGLSELDKAGFIKRQLVETRQITKHVAQILDSRMNTKYDENDKLIREVKVITLKSKLVSDFRKDFQFYKVREINNYHHAHDAYLNAVVGTALSHEYWMRHALTLAKRARDEREVPVGAVLVLNNRVIGEGWNRAIGLHDPTAHAEIMALRQGGLVMQNYRLIDATLYVTFEPCVMCAGAMIHSRIGRVVFGVRNAKTGAAGSLMDVLHYPGMNHRVEITEGILADECAALLCYFFRMPRQVFNAQKKAQSSTDGSSGSSGSETPGTSESATPESSGGSSIKKYPKLESEFVYGDYKVYDVRKMIAKSEQEIGKATAKYFFYSNIMNFFKTEITLANGEIRKRPLIETNGETGEIVWDKGRDFATVRKVLSMPQVNIVKKTEVQTGGFSKESILPKRNSDKLIARKKDWDPKKYGGFDSPTVAYSVLVVAKVEKGKSKKLKSVKELLGITIMERSSFEKNPIDFLEAKGYKEVKKDLIIKLPKYSLFELENGRKRMLASAGELQKGNELALPSKYVNFLYLASHYEKLKGSPEDNEQKQLFVEQHKHYLDEIIEQISEFSKRVILADANLDKVLSAYNKHRDKPIREQAENIIHLFTLTNLGAPAAFKYFDTTIDRKRYTSTKEVLDATLIHQSITGLYETRIDLSQLGGD

SEQ ID NO: 283 - protein, 1421 aa, synthetic construct
  REGION 1..1421: note = 112 delta HNH TadA polypeptide sequence
MDKKYSIGLAIGTNSVGWAVITDEYKVPSKKFKVLGNTDRHSIKKNLIGALLFDSGETAEATRLKRTARRRYTRRKNRICYLQEIFSNEMAKVDDSFFHRLEESFLVEEDKKHERHPIFGNIVDEVAYHEKYPTIYHLRKKLVDSTDKADLRLIYLALAHMIKFRGHFLIEGDLNPDNSDVDKLFIQLVQTYNQLFEENPINASGVDAKAILSARLSKSRRLENLIAQLPGEKKNGLFGNLIALSLGLTPNFKSNFDLAEDAKLQLSKDTYDDDLDNLLAQIGDQYADLFLAAKNLSDAILLSDILRVNTEITKAPLSASMIKRYDEHHQDLTLLKALVRQQLPEKYKEIFFDQSKNGYAGYIDGGASQEEFYKFIKPILEKMDGTEELLVKLNREDLLRKQRTFDNGSIPHQIHLGELHAILRRQEDFYPFLKDNREKIEKILTFRIPYYVGPLARGNSRFAWMTRKSEETITPWNFEEVVDKGASAQSFIERMTNFDKNLPNEKVLPKHSLLYEYFTVYNELTKVKYVTEGMRKPAFLSGEQKKAIVDLLFKTNRKVTVKQLKEDYFKKIECFDSVEISGVEDRFNASLGTYHDLLKIIKDKDFLDNEENEDILEDIVLTLTLFEDREMIEERLKTYAHLFDDKVMKQLKRRRYTGWGRLSRKLINGIRDKQSGKTILDFLKSDGFANRNFMQLIHDDSLTFKEDIQKAQVSGQGDSLHEHIANLAGSPAIKKGILQTVKVVDELVKVMGRHKPENIVIEMARENQTTQKGQKNSRERMKRIEEGIKELGSEVEFSHEYWMRHALTLAKRARDEREVPVGAVLVLNNRVIGEGWNRAIGLHDPTAHAEIMALRQGGLVMQNYRLIDATLYVTFEPCVMCAGAMIHSRIGRVVFGVRNAKTGAAGSLMDVLHYPGMNHRVEITEGILADECAALLCYFFRMPRQVFNAQKKAQSSTDGGLSELDKAGFIKRQLVETRQITKHVAQILDSRMNTKYDENDKLIREVKVITLKSKLVSDFRKDFQFYKVREINNYHHAHDAYLNAVVGTALIKKYPKLESEFVYGDYKVYDVRKMIAKSEQEIGKATAKYFFYSNIMNFFKTEITLANGEIRKRPLIETNGETGEIVWDKGRDFATVRKVLSMPQVNIVKKTEVQTGGFSKESILPKRNSDKLIARKKDWDPKKYGGFDSPTVAYSVLVVAKVEKGKSKKLKSVKELLGITIMERSSFEKNPIDFLEAKGYKEVKKDLIIKLPKYSLFELENGRKRMLASAGELQKGNELALPSKYVNFLYLASHYEKLKGSPEDNEQKQLFVEQHKHYLDEIIEQISEFSKRVILADANLDKVLSAYNKHRDKPIREQAENIIHLFTLTNLGAPAAFKYFDTTIDRKRYTSTKEVLDATLIHQSITGLYETRIDLSQLGGD

SEQ ID NO: 284 - protein, 1552 aa, synthetic construct
  REGION 1..1552: note = 113 N-term single TadA helixtrunc 165-end polypeptide sequence
MSEVEFSHEYWMRHALTLAKRARDEREVPVGAVLVLNNRVIGEGWNRAIGLHDPTAHAEIMALRQGGLVMQNYRLIDATLYVTFEPCVMCAGAMIHSRIGRVVFGVRNAKTGAAGSLMDVLHYPGMNHRVEITEGILADECAALLCYFFRMPRSGGSSGGSSGSETPGTSESATPESSGGSSGGSDKKYSIGLAIGTNSVGWAVITDEYKVPSKKFKVLGNTDRHSIKKNLIGALLFDSGETAEATRLKRTARRRYTRRKNRICYLQEIFSNEMAKVDDSFFHRLEESFLVEEDKKHERHPIFGNIVDEVAYHEKYPTIYHLRKKLVDSTDKADLRLIYLALAHMIKFRGHFLIEGDLNPDNSDVDKLFIQLVQTYNQLFEENPINASGVDAKAILSARLSKSRRLENLIAQLPGEKKNGLFGNLIALSLGLTPNFKSNFDLAEDAKLQLSKDTYDDDLDNLLAQIGDQYADLFLAAKNLSDAILLSDILRVNTEITKAPLSASMIKRYDEHHQDLTLLKALVRQQLPEKYKEIFFDQSKNGYAGYIDGGASQEEFYKFIKPILEKMDGTEELLVKLNREDLLRKQRTFDNGSIPHQIHLGELHAILRRQEDFYPFLKDNREKIEKILTFRIPYYVGPLARGNSRFAWMTRKSEETITPWNFEEVVDKGASAQSFIERMTNFDKNLPNEKVLPKHSLLYEYFTVYNELTKVKYVTEGMRKPAFLSGEQKKAIVDLLFKTNRKVTVKQLKEDYFKKIECFDSVEISGVEDRFNASLGTYHDLLKIIKDKDFLDNEENEDILEDIVLTLTLFEDREMIEERLKTYAHLFDDKVMKQLKRRRYTGWGRLSRKLINGIRDKQSGKTILDFLKSDGFANRNFMQLIHDDSLTFKEDIQKAQVSGQGDSLHEHIANLAGSPAIKKGILQTVKVVDELVKVMGRHKPENIVIEMARENQTTQKGQKNSRERMKRIEEGIKELGSQILKEHPVENTQLQNEKLYLYYLQNGRDMYVDQELDINRLSDYDVDHIVPQSFLKDDSIDNKVLTRSDKNRGKSDNVPSEEVVKKMKNYWRQLLNAKLITQRKFDNLTKAERGGLSELDKAGFIKRQLVETRQITKHVAQILDSRMNTKYDENDKLIREVKVITLKSKLVSDFRKDFQFYKVREINNYHHAHDAYLNAVVGTALIKKYPKLESEFVYGDYKVYDVRKMIAKSEQEIGKATAKYFFYSNIMNFFKTEITLANGEIRKRPLIETNGETGEIVWDKGRDFATVRKVLSMPQVNIVKKTEVQTGGFSKESILPKRNSDKLIARKKDWDPKKYGGFDSPTVAYSVLVVAKVEKGKSKKLKSVKELLGITIMERSSFEKNPIDFLEAKGYKEVKKDLIIKLPKYSLFELENGRKRMLASAGELQKGNELALPSKYVNFLYLASHYEKLKGSPEDNEQKQLFVEQHKHYLDEIIEQISEFSKRVILADANLDKVLSAYNKHRDKPIREQAENIIHLFTLTNLGAPAAFKYFDTTIDRKRYTSTKEVLDATLIHQSITGLYETRIDLSQLGGD

SEQ ID NO: 285 - protein, 1545 aa, synthetic construct
  REGION 1..1545: note = 114 N-term single TadA helixtrunc 165-end delta 59-65 polypeptide sequence
MSEVEFSHEYWMRHALTLAKRARDEREVPVGAVLVLNNRVIGEGWNRTAHAEIMALRQGGLVMQNYRLIDATLYVTFEPCVMCAGAMIHSRIGRVVFGVRNAKTGAAGSLMDVLHYPGMNHRVEITEGILADECAALLCYFFRMPRSGGSSGGSSGSETPGTSESATPESSGGSSGGSDKKYSIGLAIGTNSVGWAVITDEYKVPSKKFKVLGNTDRHSIKKNLIGALLFDSGETAEATRLKRTARRRYTRRKNRICYLQEIFSNEMAKVDDSFFHRLEESFLVEEDKKHERHPIFGNIVDEVAYHEKYPTIYHLRKKLVDSTDKADLRLIYLALAHMIKFRGHFLIEGDLNPDNSDVDKLFIQLVQTYNQLFEENPINASGVDAKAILSARLSKSRRLENLIAQLPGEKKNGLFGNLIALSLGLTPNFKSNFDLAEDAKLQLSKDTYDDDLDNLLAQIGDQYADLFLAAKNLSDAILLSDILRVNTEITKAPLSASMIKRYDEHHQDLTLLKALVRQQLPEKYKEIFFDQSKNGYAGYIDGGASQEEFYKFIKPILEKMDGTEELLVKLNREDLLRKQRTFDNGSIPHQIHLGELHAILRRQEDFYPFLKDNREKIEKILTFRIPYYVGPLARGNSRFAWMTRKSEETITPWNFEEVVDKGASAQSFIERMTNFDKNLPNEKVLPKHSLLYEYFTVYNELTKVKYVTEGMRKPAFLSGEQKKAIVDLLFKTNRKVTVKQLKEDYFKKIECFDSVEISGVEDRFNASLGTYHDLLKIIKDKDFLDNEENEDILEDIVLTLTLFEDREMIEERLKTYAHLFDDKVMKQLKRRRYTGWGRLSRKLINGIRDKQSGKTILDFLKSDGFANRNFMQLIHDDSLTFKEDIQKAQVSGQGDSLHEHIANLAGSPAIKKGILQTVKVVDELVKVMGRHKPENIVIEMARENQTTQKGQKNSRERMKRIEEGIKELGSQILKEHPVENTQLQNEKLYLYYLQNGRDMYVDQELDINRLSDYDVDHIVPQSFLKDDSIDNKVLTRSDKNRGKSDNVPSEEVVKKMKNYWRQLLNAKLITQRKFDNLTKAERGGLSELDKAGFIKRQLVETRQITKHVAQILDSRMNTKYDENDKLIREVKVITLKSKLVSDFRKDFQFYKVREINNYHHAHDAYLNAVVGTALIKKYPKLESEFVYGDYKVYDVRKMIAKSEQEIGKATAKYFFYSNIMNFFKTEITLANGEIRKRPLIETNGETGEIVWDKGRDFATVRKVLSMPQVNIVKKTEVQTGGFSKESILPKRNSDKLIARKKDWDPKKYGGFDSPTVAYSVLVVAKVEKGKSKKLKSVKELLGITIMERSSFEKNPIDFLEAKGYKEVKKDLIIKLPKYSLFELENGRKRMLASAGELQKGNELALPSKYVNFLYLASHYEKLKGSPEDNEQKQLFVEQHKHYLDEIIEQISEFSKRVILADANLDKVLSAYNKHRDKPIREQAENIIHLFTLTNLGAPAAFKYFDTTIDRKRYTSTKEVLDATLIHQSITGLYETRIDLSQLGGD

SEQ ID NO: 286 - protein, 1541 aa, synthetic construct
  REGION 1..1541: note = 115.1 Cas9 TadAins 1004 polypeptide sequence
MDKKYSIGLAIGTNSVGWAVITDEYKVPSKKFKVLGNTDRHSIKKNLIGALLFDSGETAEATRLKRTARRRYTRRKNRICYLQEIFSNEMAKVDDSFFHRLEESFLVEEDKKHERHPIFGNIVDEVAYHEKYPTIYHLRKKLVDSTDKADLRLIYLALAHMIKFRGHFLIEGDLNPDNSDVDKLFIQLVQTYNQLFEENPINASGVDAKAILSARLSKSRRLENLIAQLPGEKKNGLFGNLIALSLGLTPNFKSNFDLAEDAKLQLSKDTYDDDLDNLLAQIGDQYADLFLAAKNLSDAILLSDILRVNTEITKAPLSASMIKRYDEHHQDLTLLKALVRQQLPEKYKEIFFDQSKNGYAGYIDGGASQEEFYKFIKPILEKMDGTEELLVKLNREDLLRKQRTFDNGSIPHQIHLGELHAILRRQEDFYPFLKDNREKIEKILTFRIPYYVGPLARGNSRFAWMTRKSEETITPWNFEEVVDKGASAQSFIERMTNFDKNLPNEKVLPKHSLLYEYFTVYNELTKVKYVTEGMRKPAFLSGEQKKAIVDLLFKTNRKVTVKQLKEDYFKKIECFDSVEISGVEDRFNASLGTYHDLLKIIKDKDFLDNEENEDILEDIVLTLTLFEDREMIEERLKTYAHLFDDKVMKQLKRRRYTGWGRLSRKLINGIRDKQSGKTILDFLKSDGFANRNFMQLIHDDSLTFKEDIQKAQVSGQGDSLHEHIANLAGSPAIKKGILQTVKVVDELVKVMGRHKPENIVIEMARENQTTQKGQKNSRERMKRIEEGIKELGSQILKEHPVENTQLQNEKLYLYYLQNGRDMYVDQELDINRLSDYDVDHIVPQSFLKDDSIDNKVLTRSDKNRGKSDNVPSEEVVKKMKNYWRQLLNAKLITQRKFDNLTKAERGGLSELDKAGFIKRQLVETRQITKHVAQILDSRMNTKYDENDKLIREVKVITLKSKLVSDFRKDFQFYKVREINNYHHAHDAYLNAVVGTALIKKYPKGSSGSETPGTSESATPESSGSEVEFSHEYWMRHALTLAKRARDEREVPVGAVLVLNNRVIGEGWNRAIGLHDPTAHAEIMALRQGGLVMQNYRLIDATLYVTFEPCVMCAGAMIHSRIGRVVFGVRNAKTGAAGSLMDVLHYPGMNHRVEITEGILADECAALLCYFFRMPRQLESEFVYGDYKVYDVRKMIAKSEQEIGKATAKYFFYSNIMNFFKTEITLANGEIRKRPLIETNGETGEIVWDKGRDFATVRKVLSMPQVNIVKKTEVQTGGFSKESILPKRNSDKLIARKKDWDPKKYGGFDSPTVAYSVLVVAKVEKGKSKKLKSVKELLGITIMERSSFEKNPIDFLEAKGYKEVKKDLIIKLPKYSLFELENGRKRMLASAGELQKGNELALPSKYVNFLYLASHYEKLKGSPEDNEQKQLFVEQHKHYLDEIIEQISEFSKRVILADANLDKVLSAYNKHRDKPIREQAENIIHLFTLTNLGAPAAFKYFDTTIDRKRYTSTKEVLDATLIHQSITGLYETRIDLSQLGGD

SEQ ID NO: 287 - protein, 1541 aa, synthetic construct
  REGION 1..1541: note = 115.2 Cas9 TadAins 1005 polypeptide sequence
MDKKYSIGLAIGTNSVGWAVITDEYKVPSKKFKVLGNTDRHSIKKNLIGALLFDSGETAEATRLKRTARRRYTRRKNRICYLQEIFSNEMAKVDDSFFHRLEESFLVEEDKKHERHPIFGNIVDEVAYHEKYPTIYHLRKKLVDSTDKADLRLIYLALAHMIKFRGHFLIEGDLNPDNSDVDKLFIQLVQTYNQLFEENPINASGVDAKAILSARLSKSRRLENLIAQLPGEKKNGLFGNLIALSLGLTPNFKSNFDLAEDAKLQLSKDTYDDDLDNLLAQIGDQYADLFLAAKNLSDAILLSDILRVNTEITKAPLSASMIKRYDEHHQDLTLLKALVRQQLPEKYKEIFFDQSKNGYAGYIDGGASQEEFYKFIKPILEKMDGTEELLVKLNREDLLRKQRTFDNGSIPHQIHLGELHAILRRQEDFYPFLKDNREKIEKILTFRIPYYVGPLARGNSRFAWMTRKSEETITPWNFEEVVDKGASAQSFIERMTNFDKNLPNEKVLPKHSLLYEYFTVYNELTKVKYVTEGMRKPAFLSGEQKKAIVDLLFKTNRKVTVKQLKEDYFKKIECFDSVEISGVEDRFNASLGTYHDLLKIIKDKDFLDNEENEDILEDIVLTLTLFEDREMIEERLKTYAHLFDDKVMKQLKRRRYTGWGRLSRKLINGIRDKQSGKTILDFLKSDGFANRNFMQLIHDDSLTFKEDIQKAQVSGQGDSLHEHIANLAGSPAIKKGILQTVKVVDELVKVMGRHKPENIVIEMARENQTTQKGQKNSRERMKRIEEGIKELGSQILKEHPVENTQLQNEKLYLYYLQNGRDMYVDQELDINRLSDYDVDHIVPQSFLKDDSIDNKVLTRSDKNRGKSDNVPSEEVVKKMKNYWRQLLNAKLITQRKFDNLTKAERGGLSELDKAGFIKRQLVETRQITKHVAQILDSRMNTKYDENDKLIREVKVITLKSKLVSDFRKDFQFYKVREINNYHHAHDAYLNAVVGTALIKKYPKLGSSGSETPGTSESATPESSGSEVEFSHEYWMRHALTLAKRARDEREVPVGAVLVLNNRVIGEGWNRAIGLHDPTAHAEIMALRQGGLVMQNYRLIDATLYVTFEPCVMCAGAMIHSRIGRVVFGVRNAKTGAAGSLMDVLHYPGMNHRVEITEGILADECAALLCYFFRMPRQESEFVYGDYKVYDVRKMIAKSEQEIGKATAKYFFYSNIMNFFKTEITLANGEIRKRPLIETNGETGEIVWDKGRDFATVRKVLSMPQVNIVKKTEVQTGGFSKESILPKRNSDKLIARKKDWDPKKYGGFDSPTVAYSVLVVAKVEKGKSKKLKSVKELLGITIMERSSFEKNPIDFLEAKGYKEVKKDLIIKLPKYSLFELENGRKRMLASAGELQKGNELALPSKYVNFLYLASHYEKLKGSPEDNEQKQLFVEQHKHYLDEIIEQISEFSKRVILADANLDKVLSAYNKHRDKPIREQAENIIHLFTLTNLGAPAAFKYFDTTIDRKRYTSTKEVLDATLIHQSITGLYETRIDLSQLGGD

SEQ ID NO: 288 - protein, 1541 aa, synthetic construct
  REGION 1..1541: note = 115.3 Cas9 TadAins 1006 polypeptide sequence
MDKKYSIGLAIGTNSVGWAVITDEYKVPSKKFKVLGNTDRHSIKKNLIGALLFDSGETAEATRLKRTARRRYTRRKNRICYLQEIFSNEMAKVDDSFFHRLEESFLVEEDKKHERHPIFGNIVDEVAYHEKYPTIYHLRKKLVDSTDKADLRLIYLALAHMIKFRGHFLIEGDLNPDNSDVDKLFIQLVQTYNQLFEENPINASGVDAKAILSARLSKSRRLENLIAQLPGEKKNGLFGNLIALSLGLTPNFKSNFDLAEDAKLQLSKDTYDDDLDNLLAQIGDQYADLFLAAKNLSDAILLSDILRVNTEITKAPLSASMIKRYDEHHQDLTLLKALVRQQLPEKYKEIFFDQSKNGYAGYIDGGASQEEFYKFIKPILEKMDGTEELLVKLNREDLLRKQRTFDNGSIPHQIHLGELHAILRRQEDFYPFLKDNREKIEKILTFRIPYYVGPLARGNSRFAWMTRKSEETITPWNFEEVVDKGASAQSFIERMTNFDKNLPNEKVLPKHSLLYEYFTVYNELTKVKYVTEGMRKPAFLSGEQKKAIVDLLFKTNRKVTVKQLKEDYFKKIECFDSVEISGVEDRFNASLGTYHDLLKIIKDKDFLDNEENEDILEDIVLTLTLFEDREMIEERLKTYAHLFDDKVMKQLKRRRYTGWGRLSRKLINGIRDKQSGKTILDFLKSDGFANRNFMQLIHDDSLTFKEDIQKAQVSGQGDSLHEHIANLAGSPAIKKGILQTVKVVDELVKVMGRHKPENIVIEMARENQTTQKGQKNSRERMKRIEEGIKELGSQILKEHPVENTQLQNEKLYLYYLQNGRDMYVDQELDINRLSDYDVDHIVPQSFLKDDSIDNKVLTRSDKNRGKSDNVPSEEVVKKMKNYWRQLLNAKLITQRKFDNLTKAERGGLSELDKAGFIKRQLVETRQITKHVAQILDSRMNTKYDENDKLIREVKVITLKSKLVSDFRKDFQFYKVREINNYHHAHDAYLNAVVGTALIKKYPKLEGSSGSETPGTSESATPESSGSEVEFSHEYWMRHALTLAKRARDEREVPVGAVLVLNNRVIGEGWNRAIGLHDPTAHAEIMALRQGGLVMQNYRLIDATLYVTFEPCVMCAGAMIHSRIGRVVFGVRNAKTGAAGSLMDVLHYPGMNHRVEITEGILADECAALLCYFFRMPRQSEFVYGDYKVYDVRKMIAKSEQEIGKATAKYFFYSNIMNFFKTEITLANGEIRKRPLIETNGETGEIVWDKGRDFATVRKVLSMPQVNIVKKTEVQTGGFSKESILPKRNSDKLIARKKDWDPKKYGGFDSPTVAYSVLVVAKVEKGKSKKLKSVKELLGITIMERSSFEKNPIDFLEAKGYKEVKKDLIIKLPKYSLFELENGRKRMLASAGELQKGNELALPSKYVNFLYLASHYEKLKGSPEDNEQKQLFVEQHKHYLDEIIEQISEFSKRVILADANLDKVLSAYNKHRDKPIREQAENIIHLFTLTNLGAPAAFKYFDTTIDRKRYTSTKEVLDATLIHQSITGLYETRIDLSQLGGD

SEQ ID NO: 289 - protein, 1541 aa, synthetic construct
  REGION 1..1541: note = 115.4 Cas9 TadAins 1007 polypeptide sequence
MDKKYSIGLAIGTNSVGWAVITDEYKVPSKKFKVLGNTDRHSIKKNLIGALLFDSGETAEATRLKRTARRRYTRRKNRICYLQEIFSNEMAKVDDSFFHRLEESFLVEEDKKHERHPIFGNIVDEVAYHEKYPTIYHLRKKLVDSTDKADLRLIYLALAHMIKFRGHFLIEGDLNPDNSDVDKLFIQLVQTYNQLFEENPINASGVDAKAILSARLSKSRRLENLIAQLPGEKKNGLFGNLIALSLGLTPNFKSNFDLAEDAKLQLSKDTYDDDLDNLLAQIGDQYADLFLAAKNLSDAILLSDILRVNTEITKAPLSASMIKRYDEHHQDLTLLKALVRQQLPEKYKEIFFDQSKNGYAGYIDGGASQEEFYKFIKPILEKMDGTEELLVKLNREDLLRKQRTFDNGSIPHQIHLGELHAILRRQEDFYPFLKDNREKIEKILTFRIPYYVGPLARGNSRFAWMTRKSEETITPWNFEEVVDKGASAQSFIERMTNFDKNLPNEKVLPKHSLLYEYFTVYNELTKVKYVTEGMRKPAFLSGEQKKAIVDLLFKTNRKVTVKQLKEDYFKKIECFDSVEISGVEDRFNASLGTYHDLLKIIKDKDFLDNEENEDILEDIVLTLTLFEDREMIEERLKTYAHLFDDKVMKQLKRRRYTGWGRLSRKLINGIRDKQSGKTILDFLKSDGFANRNFMQLIHDDSLTFKEDIQKAQVSGQGDSLHEHIANLAGSPAIKKGILQTVKVVDELVKVMGRHKPENIVIEMARENQTTQKGQKNSRERMKRIEEGIKELGSQILKEHPVENTQLQNEKLYLYYLQNGRDMYVDQELDINRLSDYDVDHIVPQSFLKDDSIDNKVLTRSDKNRGKSDNVPSEEVVKKMKNYWRQLLNAKLITQRKFDNLTKAERGGLSELDKAGFIKRQLVETRQITKHVAQILDSRMNTKYDENDKLIREVKVITLKSKLVSDFRKDFQFYKVREINNYHHAHDAYLNAVVGTALIKKYPKLESGSSGSETPGTSESATPESSGSEVEFSHEYWMRHALTLAKRARDEREVPVGAVLVLNNRVIGEGWNRAIGLHDPTAHAEIMALRQGGLVMQNYRLIDATLYVTFEPCVMCAGAMIHSRIGRVVFGVRNAKTGAAGSLMDVLHYPGMNHRVEITEGILADECAALLCYFFRMPRQEFVYGDYKVYDVRKMIAKSEQEIGKATAKYFFYSNIMNFFKTEITLANGEIRKRPLIETNGETGEIVWDKGRDFATVRKVLSMPQVNIVKKTEVQTGGFSKESILPKRNSDKLIARKKDWDPKKYGGFDSPTVAYSVLVVAKVEKGKSKKLKSVKELLGITIMERSSFEKNPIDFLEAKGYKEVKKDLIIKLPKYSLFELENGRKRMLASAGELQKGNELALPSKYVNFLYLASHYEKLKGSPEDNEQKQLFVEQHKHYLDEIIEQISEFSKRVILADANLDKVLSAYNKHRDKPIREQAENIIHLFTLTNLGAPAAFKYFDTTIDRKRYTSTKEVLDATLIHQSITGLYETRIDLSQLGGD

SEQ ID NO: 290 - protein, 1541 aa, synthetic construct
  REGION 1..1541: note = 116.1 Cas9 TadAins C-term truncate 792 polypeptide sequence
MDKKYSIGLAIGTNSVGWAVITDEYKVPSKKFKVLGNTDRHSIKKNLIGALLFDSGETAEATRLKRTARRRYTRRKNRICYLQEIFSNEMAKVDDSFFHRLEESFLVEEDKKHERHPIFGNIVDEVAYHEKYPTIYHLRKKLVDSTDKADLRLIYLALAHMIKFRGHFLIEGDLNPDNSDVDKLFIQLVQTYNQLFEENPINASGVDAKAILSARLSKSRRLENLIAQLPGEKKNGLFGNLIALSLGLTPNFKSNFDLAEDAKLQLSKDTYDDDLDNLLAQIGDQYADLFLAAKNLSDAILLSDILRVNTEITKAPLSASMIKRYDEHHQDLTLLKALVRQQLPEKYKEIFFDQSKNGYAGYIDGGASQEEFYKFIKPILEKMDGTEELLVKLNREDLLRKQRTFDNGSIPHQIHLGELHAILRRQEDFYPFLKDNREKIEKILTFRIPYYVGPLARGNSRFAWMTRKSEETITPWNFEEVVDKGASAQSFIERMTNFDKNLPNEKVLPKHSLLYEYFTVYNELTKVKYVTEGMRKPAFLSGEQKKAIVDLLFKTNRKVTVKQLKEDYFKKIECFDSVEISGVEDRFNASLGTYHDLLKIIKDKDFLDNEENEDILEDIVLTLTLFEDREMIEERLKTYAHLFDDKVMKQLKRRRYTGWGRLSRKLINGIRDKQSGKTILDFLKSDGFANRNFMQLIHDDSLTFKEDIQKAQVSGQGDSLHEHIANLAGSPAIKKGILQTVKVVDELVKVMGRHKPENIVIEMARENQTTQKGQKNSRERMKRIEEGIKELGGSSGSETPGTSESATPESSGSEVEFSHEYWMRHALTLAKRARDEREVPVGAVLVLNNRVIGEGWNRAIGLHDPTAHAEIMALRQGGLVMQNYRLIDATLYVTFEPCVMCAGAMIHSRIGRVVFGVRNAKTGAAGSLMDVLHYPGMNHRVEITEGILADECAALLCYFFRMPRQSQILKEHPVENTQLQNEKLYLYYLQNGRDMYVDQELDINRLSDYDVDHIVPQSFLKDDSIDNKVLTRSDKNRGKSDNVPSEEVVKKMKNYWRQLLNAKLITQRKFDNLTKAERGGLSELDKAGFIKRQLVETRQITKHVAQILDSRMNTKYDENDKLIREVKVITLKSKLVSDFRKDFQFYKVREINNYHHAHDAYLNAVVGTALIKKYPKLESEFVYGDYKVYDVRKMIAKSEQEIGKATAKYFFYSNIMNFFKTEITLANGEIRKRPLIETNGETGEIVWDKGRDFATVRKVLSMPQVNIVKKTEVQTGGFSKESILPKRNSDKLIARKKDWDPKKYGGFDSPTVAYSVLVVAKVEKGKSKKLKSVKELLGITIMERSSFEKNPIDFLEAKGYKEVKKDLIIKLPKYSLFELENGRKRMLASAGELQKGNELALPSKYVNFLYLASHYEKLKGSPEDNEQKQLFVEQHKHYLDEIIEQISEFSKRVILADANLDKVLSAYNKHRDKPIREQAENIIHLFTLTNLGAPAAFKYFDTTIDRKRYTSTKEVLDATLIHQSITGLYETRIDLSQLGGD

SEQ ID NO: 291 - protein, 1541 aa, synthetic construct
  REGION 1..1541: note = 116.2 Cas9 TadAins C-term truncate 791 polypeptide sequence
MDKKYSIGLAIGTNSVGWAVITDEYKVPSKKFKVLGNTDRHSIKKNLIGALLFDSGETAEATRLKRTARRRYTRRKNRICYLQEIFSNEMAKVDDSFFHRLEESFLVEEDKKHERHPIFGNIVDEVAYHEKYPTIYHLRKKLVDSTDKADLRLIYLALAHMIKFRGHFLIEGDLNPDNSDVDKLFIQLVQTYNQLFEENPINASGVDAKAILSARLSKSRRLENLIAQLPGEKKNGLFGNLIALSLGLTPNFKSNFDLAEDAKLQLSKDTYDDDLDNLLAQIGDQYADLFLAAKNLSDAILLSDILRVNTEITKAPLSASMIKRYDEHHQDLTLLKALVRQQLPEKYKEIFFDQSKNGYAGYIDGGASQEEFYKFIKPILEKMDGTEELLVKLNREDLLRKQRTFDNGSIPHQIHLGELHAILRRQEDFYPFLKDNREKIEKILTFRIPYYVGPLARGNSRFAWMTRKSEETITPWNFEEVVDKGASAQSFIERMTNFDKNLPNEKVLPKHSLLYEYFTVYNELTKVKYVTEGMRKPAFLSGEQKKAIVDLLFKTNRKVTVKQLKEDYFKKIECFDSVEISGVEDRFNASLGTYHDLLKIIKDKDFLDNEENEDILEDIVLTLTLFEDREMIEERLKTYAHLFDDKVMKQLKRRRYTGWGRLSRKLINGIRDKQSGKTILDFLKSDGFANRNFMQLIHDDSLTFKEDIQKAQVSGQGDSLHEHIANLAGSPAIKKGILQTVKVVDELVKVMGRHKPENIVIEMARENQTTQKGQKNSRERMKRIEEGIKELGSSGSETPGTSESATPESSGSEVEFSHEYWMRHALTLAKRARDEREVPVGAVLVLNNRVIGEGWNRAIGLHDPTAHAEIMALRQGGLVMQNYRLIDATLYVTFEPCVMCAGAMIHSRIGRVVFGVRNAKTGAAGSLMDVLHYPGMNHRVEITEGILADECAALLCYFFRMPRQGSQILKEHPVENTQLQNEKLYLYYLQNGRDMYVDQELDINRLSDYDVDHIVPQSFLKDDSIDNKVLTRSDKNRGKSDNVPSEEVVKKMKNYWRQLLNAKLITQRKFDNLTKAERGGLSELDKAGFIKRQLVETRQITKHVAQILDSRMNTKYDENDKLIREVKVITLKSKLVSDFRKDFQFYKVREINNYHHAHDAYLNAVVGTALIKKYPKLESEFVYGDYKVYDVRKMIAKSEQEIGKATAKYFFYSNIMNFFKTEITLANGEIRKRPLIETNGETGEIVWDKGRDFATVRKVLSMPQVNIVKKTEVQTGGFSKESILPKRNSDKLIARKKDWDPKKYGGFDSPTVAYSVLVVAKVEKGKSKKLKSVKELLGITIMERSSFEKNPIDFLEAKGYKEVKKDLIIKLPKYSLFELENGRKRMLASAGELQKGNELALPSKYVNFLYLASHYEKLKGSPEDNEQKQLFVEQHKHYLDEIIEQISEFSKRVILADANLDKVLSAYNKHRDKPIREQAENIIHLFTLTNLGAPAAFKYFDTTIDRKRYTSTKEVLDATLIHQSITGLYETRIDLSQLGGD

SEQ ID NO: 292 - protein, 1541 aa, synthetic construct
  REGION 1..1541: note = 116.3 Cas9 TadAins C-term truncate 790 polypeptide sequence
MDKKYSIGLAIGTNSVGWAVITDEYKVPSKKFKVLGNTDRHSIKKNLIGALLFDSGETAEATRLKRTARRRYTRRKNRICYLQEIFSNEMAKVDDSFFHRLEESFLVEEDKKHERHPIFGNIVDEVAYHEKYPTIYHLRKKLVDSTDKADLRLIYLALAHMIKFRGHFLIEGDLNPDNSDVDKLFIQLVQTYNQLFEENPINASGVDAKAILSARLSKSRRLENLIAQLPGEKKNGLFGNLIALSLGLTPNFKSNFDLAEDAKLQLSKDTYDDDLDNLLAQIGDQYADLFLAAKNLSDAILLSDILRVNTEITKAPLSASMIKRYDEHHQDLTLLKALVRQQLPEKYKEIFFDQSKNGYAGYIDGGASQEEFYKFIKPILEKMDGTEELLVKLNREDLLRKQRTFDNGSIPHQIHLGELHAILRRQEDFYPFLKDNREKIEKILTFRIPYYVGPLARGNSRFAWMTRKSEETITPWNFEEVVDKGASAQSFIERMTNFDKNLPNEKVLPKHSLLYEYFTVYNELTKVKYVTEGMRKPAFLSGEQKKAIVDLLFKTNRKVTVKQLKEDYFKKIECFDSVEISGVEDRFNASLGTYHDLLKIIKDKDFLDNEENEDILEDIVLTLTLFEDREMIEERLKTYAHLFDDKVMKQLKRRRYTGWGRLSRKLINGIRDKQSGKTILDFLKSDGFANRNFMQLIHDDSLTFKEDIQKAQVSGQGDSLHEHIANLAGSPAIKKGILQTVKVVDELVKVMGRHKPENIVIEMARENQTTQKGQKNSRERMKRIEEGIKEGSSGSETPGTSESATPESSGSEVEFSHEYWMRHALTLAKRARDEREVPVGAVLVLNNRVIGEGWNRAIGLHDPTAHAEIMALRQGGLVMQNYRLIDATLYVTFEPCVMCAGAMIHSRIGRVVFGVRNAKTGAAGSLMDVLHYPGMNHRVEITEGILADECAALLCYFFRMPRQLGSQILKEHPVENTQLQNEKLYLYYLQNGRDMYVDQELDINRLSDYDVDHIVPQSFLKDDSIDNKVLTRSDKNRGKSDNVPSEEVVKKMKNYWRQLLNAKLITQRKFDNLTKAERGGLSELDKAGFIKRQLVETRQITKHVAQILDSRMNTKYDENDKLIREVKVITLKSKLVSDFRKDFQFYKVREINNYHHAHDAYLNAVVGTALIKKYPKLESEFVYGDYKVYDVRKMIAKSEQEIGKATAKYFFYSNIMNFFKTEITLANGEIRKRPLIETNGETGEIVWDKGRDFATVRKVLSMPQVNIVKKTEVQTGGFSKESILPKRNSDKLIARKKDWDPKKYGGFDSPTVAYSVLVVAKVEKGKSKKLKSVKELLGITIMERSSFEKNPIDFLEAKGYKEVKKDLIIKLPKYSLFELENGRKRMLASAGELQKGNELALPSKYVNFLYLASHYEKLKGSPEDNEQKQLFVEQHKHYLDEIIEQISEFSKRVILADANLDKVLSAYNKHRDKPIREQAENIIHLFTLTNLGAPAAFKYFDTTIDRKRYTSTKEVLDATLIHQSITGLYETRIDLSQLGGD

SEQ ID NO: 293 - protein, 1484 aa, synthetic construct
  REGION 1..1484: note = 117 Cas9 delta 1017-1069 polypeptide sequence
MDKKYSIGLAIGTNSVGWAVITDEYKVPSKKFKVLGNTDRHSIKKNLIGALLFDSGETAEATRLKRTARRRYTRRKNRICYLQEIFSNEMAKVDDSFFHRLEESFLVEEDKKHERHPIFGNIVDEVAYHEKYPTIYHLRKKLVDSTDKADLRLIYLALAHMIKFRGHFLIEGDLNPDNSDVDKLFIQLVQTYNQLFEENPINASGVDAKAILSARLSKSRRLENLIAQLPGEKKNGLFGNLIALSLGLTPNFKSNFDLAEDAKLQLSKDTYDDDLDNLLAQIGDQYADLFLAAKNLSDAILLSDILRVNTEITKAPLSASMIKRYDEHHQDLTLLKALVRQQLPEKYKEIFFDQSKNGYAGYIDGGASQEEFYKFIKPILEKMDGTEELLVKLNREDLLRKQRTFDNGSIPHQIHLGELHAILRRQEDFYPFLKDNREKIEKILTFRIPYYVGPLARGNSRFAWMTRKSEETITPWNFEEVVDKGASAQSFIERMTNFDKNLPNEKVLPKHSLLYEYFTVYNELTKVKYVTEGMRKPAFLSGEQKKAIVDLLFKTNRKVTVKQLKEDYFKKIECFDSVEISGVEDRFNASLGTYHDLLKIIKDKDFLDNEENEDILEDIVLTLTLFEDREMIEERLKTYAHLFDDKVMKQLKRRRYTGWGRLSRKLINGIRDKQSGKTILDFLKSDGFANRNFMQLIHDDSLTFKEDIQKAQVSGQGDSLHEHIANLAGSPAIKKGILQTVKVVDELVKVMGRHKPENIVIEMARENQTTQKGQKNSRERMKRIEEGIKELGSQILKEHPVENTQLQNEKLYLYYLQNGRDMYVDQELDINRLSDYDVDHIVPQSFLKDDSIDNKVLTRSDKNRGKSDNVPSEEVVKKMKNYWRQLLNAKLITQRKFDNLTKAERGGLSELDKAGFIKRQLVETRQITKHVAQILDSRMNTKYDENDKLIREVKVITLKSKLVSDFRKDFQFYKVREINNYHHAHDAYLNAVVGTALIKKYPKLESEFVYGDYKVYSSGSEVEFSHEYWMRHALTLAKRARDEREVPVGAVLVLNNRVIGEGWNRAIGLHDPTAHAEIMALRQGGLVMQNYRLIDATLYVTFEPCVMCAGAMIHSRIGRVVFGVRNAKTGAAGSLMDVLHYPGMNHRVEITEGILADECAALLCYFFRMPRQVFNAQKKAQSSTDGEIVWDKGRDFATVRKVLSMPQVNIVKKTEVQTGGFSKESILPKRNSDKLIARKKDWDPKKYGGFDSPTVAYSVLVVAKVEKGKSKKLKSVKELLGITIMERSSFEKNPIDFLEAKGYKEVKKDLIIKLPKYSLFELENGRKRMLASAGELQKGNELALPSKYVNFLYLASHYEKLKGSPEDNEQKQLFVEQHKHYLDEIIEQISEFSKRVILADANLDKVLSAYNKHRDKPIREQAENIIHLFTLTNLGAPAAFKYFDTTIDRKRYTSTKEVLDATLIHQSITGLYETRIDLSQLGGD

SEQ ID NO: 294 - protein, 1554 aa, synthetic construct
  REGION 1..1554: note = 118 Cas9 TadA-CP116ins 1067 polypeptide sequence
MDKKYSIGLAIGTNSVGWAVITDEYKVPSKKFKVLGNTDRHSIKKNLIGALLFDSGETAEATRLKRTARRRYTRRKNRICYLQEIFSNEMAKVDDSFFHRLEESFLVEEDKKHERHPIFGNIVDEVAYHEKYPTIYHLRKKLVDSTDKADLRLIYLALAHMIKFRGHFLIEGDLNPDNSDVDKLFIQLVQTYNQLFEENPINASGVDAKAILSARLSKSRRLENLIAQLPGEKKNGLFGNLIALSLGLTPNFKSNFDLAEDAKLQLSKDTYDDDLDNLLAQIGDQYADLFLAAKNLSDAILLSDILRVNTEITKAPLSASMIKRYDEHHQDLTLLKALVRQQLPEKYKEIFFDQSKNGYAGYIDGGASQEEFYKFIKPILEKMDGTEELLVKLNREDLLRKQRTFDNGSIPHQIHLGELHAILRRQEDFYPFLKDNREKIEKILTFRIPYYVGPLARGNSRFAWMTRKSEETITPWNFEEVVDKGASAQSFIERMTNFDKNLPNEKVLPKHSLLYEYFTVYNELTKVKYVTEGMRKPAFLSGEQKKAIVDLLFKTNRKVTVKQLKEDYFKKIECFDSVEISGVEDRFNASLGTYHDLLKIIKDKDFLDNEENEDILEDIVLTLTLFEDREMIEERLKTYAHLFDDKVMKQLKRRRYTGWGRLSRKLINGIRDKQSGKTILDFLKSDGFANRNFMQLIHDDSLTFKEDIQKAQVSGQGDSLHEHIANLAGSPAIKKGILQTVKVVDELVKVMGRHKPENIVIEMARENQTTQKGQKNSRERMKRIEEGIKELGSQILKEHPVENTQLQNEKLYLYYLQNGRDMYVDQELDINRLSDYDVDHIVPQSFLKDDSIDNKVLTRSDKNRGKSDNVPSEEVVKKMKNYWRQLLNAKLITQRKFDNLTKAERGGLSELDKAGFIKRQLVETRQITKHVAQILDSRMNTKYDENDKLIREVKVITLKSKLVSDFRKDFQFYKVREINNYHHAHDAYLNAVVGTALIKKYPKLESEFVYGDYKVYDVRKMIAKSEQEIGKATAKYFFYSNIMNFFKTEITLANGEIRKRPLIETNMNHRVEITEGILADECAALLCYFFRMPRQVFNAQKKAQSSTDGSSGSETPGTSESATPESSGSEVEFSHEYWMRHALTLAKRARDEREVPVGAVLVLNNRVIGEGWNRAIGLHDPTAHAEIMALRQGGLVMQNYRLIDATLYVTFEPCVMCAGAMIHSRIGRVVFGVRNAKTGAAGSLMDVLHYPGGETGEIVWDKGRDFATVRKVLSMPQVNIVKKTEVQTGGFSKESILPKRNSDKLIARKKDWDPKKYGGFDSPTVAYSVLVVAKVEKGKSKKLKSVKELLGITIMERSSFEKNPIDFLEAKGYKEVKKDLIIKLPKYSLFELENGRKRMLASAGELQKGNELALPSKYVNFLYLASHYEKLKGSPEDNEQKQLFVEQHKHYLDEIIEQISEFSKRVILADANLDKVLSAYNKHRDKPIREQAENIIHLFTLTNLGAPAAFKYFDTTIDRKRYTSTKEVLDATLIHQSITGLYETRIDLSQLGGD

SEQ ID NO: 295 - protein, 1554 aa, synthetic construct
  REGION 1..1554: note = 119 Cas9 TadAins 701 polypeptide sequence
MDKKYSIGLAIGTNSVGWAVITDEYKVPSKKFKVLGNTDRHSIKKNLIGALLFDSGETAEATRLKRTARRRYTRRKNRICYLQEIFSNEMAKVDDSFFHRLEESFLVEEDKKHERHPIFGNIVDEVAYHEKYPTIYHLRKKLVDSTDKADLRLIYLALAHMIKFRGHFLIEGDLNPDNSDVDKLFIQLVQTYNQLFEENPINASGVDAKAILSARLSKSRRLENLIAQLPGEKKNGLFGNLIALSLGLTPNFKSNFDLAEDAKLQLSKDTYDDDLDNLLAQIGDQYADLFLAAKNLSDAILLSDILRVNTEITKAPLSASMIKRYDEHHQDLTLLKALVRQQLPEKYKEIFFDQSKNGYAGYIDGGASQEEFYKFIKPILEKMDGTEELLVKLNREDLLRKQRTFDNGSIPHQIHLGELHAILRRQEDFYPFLKDNREKIEKILTFRIPYYVGPLARGNSRFAWMTRKSEETITPWNFEEVVDKGASAQSFIERMTNFDKNLPNEKVLPKHSLLYEYFTVYNELTKVKYVTEGMRKPAFLSGEQKKAIVDLLFKTNRKVTVKQLKEDYFKKIECFDSVEISGVEDRFNASLGTYHDLLKIIKDKDFLDNEENEDILEDIVLTLTLFEDREMIEERLKTYAHLFDDKVMKQLKRRRYTGWGRLSRKLINGIRDKQSGKTILDFLKSDGFANRNFMQLIHDDSGSSGSETPGTSESATPESSGSEVEFSHEYWMRHALTLAKRARDEREVPVGAVLVLNNRVIGEGWNRAIGLHDPTAHAEIMALRQGGLVMQNYRLIDATLYVTFEPCVMCAGAMIHSRIGRVVFGVRNAKTGAAGSLMDVLHYPGMNHRVEITEGILADECAALLCYFFRMPRQVFNAQKKAQSSTDLTFKEDIQKAQVSGQGDSLHEHIANLAGSPAIKKGILQTVKVVDELVKVMGRHKPENIVIEMARENQTTQKGQKNSRERMKRIEEGIKELGSQILKEHPVENTQLQNEKLYLYYLQNGRDMYVDQELDINRLSDYDVDHIVPQSFLKDDSIDNKVLTRSDKNRGKSDNVPSEEVVKKMKNYWRQLLNAKLITQRKFDNLTKAERGGLSELDKAGFIKRQLVETRQITKHVAQILDSRMNTKYDENDKLIREVKVITLKSKLVSDFRKDFQFYKVREINNYHHAHDAYLNAVVGTALIKKYPKLESEFVYGDYKVYDVRKMIAKSEQEIGKATAKYFFYSNIMNFFKTEITLANGEIRKRPLIETNGETGEIVWDKGRDFATVRKVLSMPQVNIVKKTEVQTGGFSKESILPKRNSDKLIARKKDWDPKKYGGFDSPTVAYSVLVVAKVEKGKSKKLKSVKELLGITIMERSSFEKNPIDFLEAKGYKEVKKDLIIKLPKYSLFELENGRKRMLASAGELQKGNELALPSKYVNFLYLASHYEKLKGSPEDNEQKQLFVEQHKHYLDEIIEQISEFSKRVILADANLDKVLSAYNKHRDKPIREQAENIIHLFTLTNLGAPAAFKYFDTTIDRKRYTSTKEVLDATLIHQSITGLYETRIDLSQLGGD

SEQ ID NO: 296 - protein, 1554 aa, synthetic construct
  REGION 1..1554: note = 120 Cas9 TadACP136ins 1248 polypeptide sequence
MDKKYSIGLAIGTNSVGWAVITDEYKVPSKKFKVLGNTDRHSIKKNLIGALLFDSGETAEATRLKRTARRRYTRRKNRICYLQEIFSNEMAKVDDSFFHRLEESFLVEEDKKHERHPIFGNIVDEVAYHEKYPTIYHLRKKLVDSTDKADLRLIYLALAHMIKFRGHFLIEGDLNPDNSDVDKLFIQLVQTYNQLFEENPINASGVDAKAILSARLSKSRRLENLIAQLPGEKKNGLFGNLIALSLGLTPNFKSNFDLAEDAKLQLSKDTYDDDLDNLLAQIGDQYADLFLAAKNLSDAILLSDILRVNTEITKAPLSASMIKRYDEHHQDLTLLKALVRQQLPEKYKEIFFDQSKNGYAGYIDGGASQEEFYKFIKPILEKMDGTEELLVKLNREDLLRKQRTFDNGSIPHQIHLGELHAILRRQEDFYPFLKDNREKIEKILTFRIPYYVGPLARGNSRFAWMTRKSEETITPWNFEEVVDKGASAQSFIERMTNFDKNLPNEKVLPKHSLLYEYFTVYNELTKVKYVTEGMRKPAFLSGEQKKAIVDLLFKTNRKVTVKQLKEDYFKKIECFDSVEISGVEDRFNASLGTYHDLLKIIKDKDFLDNEENEDILEDIVLTLTLFEDREMIEERLKTYAHLFDDKVMKQLKRRRYTGWGRLSRKLINGIRDKQSGKTILDFLKSDGFANRNFMQLIHDDSLTFKEDIQKAQVSGQGDSLHEHIANLAGSPAIKKGILQTVKVVDELVKVMGRHKPENIVIEMARENQTTQKGQKNSRERMKRIEEGIKELGSQILKEHPVENTQLQNEKLYLYYLQNGRDMYVDQELDINRLSDYDVDHIVPQSFLKDDSIDNKVLTRSDKNRGKSDNVPSEEVVKKMKNYWRQLLNAKLITQRKFDNLTKAERGGLSELDKAGFIKRQLVETRQITKHVAQILDSRMNTKYDENDKLIREVKVITLKSKLVSDFRKDFQFYKVREINNYHHAHDAYLNAVVGTALIKKYPKLESEFVYGDYKVYDVRKMIAKSEQEIGKATAKYFFYSNIMNFFKTEITLANGEIRKRPLIETNGETGEIVWDKGRDFATVRKVLSMPQVNIVKKTEVQTGGFSKESILPKRNSDKLIARKKDWDPKKYGGFDSPTVAYSVLVVAKVEKGKSKKLKSVKELLGITIMERSSFEKNPIDFLEAKGYKEVKKDLIIKLPKYSLFELENGRKRMLASAGELQKGNELALPSKYVNFLYLASHYEKLKGSMNHRVEITEGILADECAALLCYFFRMPRQVFNAQKKAQSSTDGSSGSETPGTSESATPESSGSEVEFSHEYWMRHALTLAKRARDEREVPVGAVLVLNNRVIGEGWNRAIGLHDPTAHAEIMALRQGGLVMQNYRLIDATLYVTFEPCVMCAGAMIHSRIGRVVFGVRNAKTGAAGSLMDVLHYPGPEDNEQKQLFVEQHKHYLDEIIEQISEFSKRVILADANLDKVLSAYNKHRDKPIREQAENIIHLFTLTNLGAPAAFKYFDTTIDRKRYTSTKEVLDATLIHQSITGLYETRIDLSQLGGD

SEQ ID NO: 297 - protein, 1554 aa, synthetic construct
  REGION 1..1554: note = 121 Cas9 TadACP136ins 1052 polypeptide sequence
MDKKYSIGLAIGTNSVGWAVITDEYKVPSKKFKVLGNTDRHSIKKNLIGALLFDSGETAEATRLKRTARRRYTRRKNRICYLQEIFSNEMAKVDDSFFHRLEESFLVEEDKKHERHPIFGNIVDEVAYHEKYPTIYHLRKKLVDSTDKADLRLIYLALAHMIKFRGHFLIEGDLNPDNSDVDKLFIQLVQTYNQLFEENPINASGVDAKAILSARLSKSRRLENLIAQLPGEKKNGLFGNLIALSLGLTPNFKSNFDLAEDAKLQLSKDTYDDDLDNLLAQIGDQYADLFLAAKNLSDAILLSDILRVNTEITKAPLSASMIKRYDEHHQDLTLLKALVRQQLPEKYKEIFFDQSKNGYAGYIDGGASQEEFYKFIKPILEKMDGTEELLVKLNREDLLRKQRTFDNGSIPHQIHLGELHAILRRQEDFYPFLKDNREKIEKILTFRIPYYVGPLARGNSRFAWMTRKSEETITPWNFEEVVDKGASAQSFIERMTNFDKNLPNEKVLPKHSLLYEYFTVYNELTKVKYVTEGMRKPAFLSGEQKKAIVDLLFKTNRKVTVKQLKEDYFKKIECFDSVEISGVEDRFNASLGTYHDLLKIIKDKDFLDNEENEDILEDIVLTLTLFEDREMIEERLKTYAHLFDDKVMKQLKRRRYTGWGRLSRKLINGIRDKQSGKTILDFLKSDGFANRNFMQLIHDDSLTFKEDIQKAQVSGQGDSLHEHIANLAGSPAIKKGILQTVKVVDELVKVMGRHKPENIVIEMARENQTTQKGQKNSRERMKRIEEGIKELGSQILKEHPVENTQLQNEKLYLYYLQNGRDMYVDQELDINRLSDYDVDHIVPQSFLKDDSIDNKVLTRSDKNRGKSDNVPSEEVVKKMKNYWRQLLNAKLITQRKFDNLTKAERGGLSELDKAGFIKRQLVETRQITKHVAQILDSRMNTKYDENDKLIREVKVITLKSKLVSDFRKDFQFYKVREINNYHHAHDAYLNAVVGTALIKKYPKLESEFVYGDYKVYDVRKMIAKSEQEIGKATAKYFFYSNIMNFFKTEITLAMNHRVEITEGILADECAALLCYFFRMPRQVFNAQKKAQSSTDGSSGSETPGTSESATPESSGSEVEFSHEYWMRHALTLAKRARDEREVPVGAVLVLNNRVIGEGWNRAIGLHDPTAHAEIMALRQGGLVMQNYRLIDATLYVTFEPCVMCAGAMIHSRIGRVVFGVRNAKTGAAGSLMDVLHYPGNGEIRKRPLIETNGETGEIVWDKGRDFATVRKVLSMPQVNIVKKTEVQTGGFSKESILPKRNSDKLIARKKDWDPKKYGGFDSPTVAYSVLVVAKVEKGKSKKLKSVKELLGITIMERSSFEKNPIDFLEAKGYKEVKKDLIIKLPKYSLFELENGRKRMLASAGELQKGNELALPSKYVNFLYLASHYEKLKGSPEDNEQKQLFVEQHKHYLDEIIEQISEFSKRVILADANLDKVLSAYNKHRDKPIREQAENIIHLFTLTNLGAPAAFKYFDTTIDRKRYTSTKEVLDATLIHQSITGLYETRIDLSQLGGD

SEQ ID NO: 298 - protein, 1554 aa, synthetic construct
  REGION 1..1554: note = 122 Cas9 TadACP136ins 1041 polypeptide sequence
MDKKYSIGLAIGTNSVGWAVITDEYKVPSKKFKVLGNTDRHSIKKNLIGALLFDSGETAEATRLKRTARRRYTRRKNRICYLQEIFSNEMAKVDDSFFHRLEESFLVEEDKKHERHPIFGNIVDEVAYHEKYPTIYHLRKKLVDSTDKADLRLIYLALAHMIKFRGHFLIEGDLNPDNSDVDKLFIQLVQTYNQLFEENPINASGVDAKAILSARLSKSRRLENLIAQLPGEKKNGLFGNLIALSLGLTPNFKSNFDLAEDAKLQLSKDTYDDDLDNLLAQIGDQYADLFLAAKNLSDAILLSDILRVNTEITKAPLSASMIKRYDEHHQDLTLLKALVRQQLPEKYKEIFFDQSKNGYAGYIDGGASQEEFYKFIKPILEKMDGTEELLVKLNREDLLRKQRTFDNGSIPHQIHLGELHAILRRQEDFYPFLKDNREKIEKILTFRIPYYVGPLARGNSRFAWMTRKSEETITPWNFEEVVDKGASAQSFIERMTNFDKNLPNEKVLPKHSLLYEYFTVYNELTKVKYVTEGMRKPAFLSGEQKKAIVDLLFKTNRKVTVKQLKEDYFKKIECFDSVEISGVEDRFNASLGTYHDLLKIIKDKDFLDNEENEDILEDIVLTLTLFEDREMIEERLKTYAHLFDDKVMKQLKRRRYTGWGRLSRKLINGIRDKQSGKTILDFLKSDGFANRNFMQLIHDDSLTFKEDIQKAQVSGQGDSLHEHIANLAGSPAIKKGILQTVKVVDELVKVMGRHKPENIVIEMARENQTTQKGQKNSRERMKRIEEGIKELGSQILKEHPVENTQLQNEKLYLYYLQNGRDMYVDQELDINRLSDYDVDHIVPQSFLKDDSIDNKVLTRSDKNRGKSDNVPSEEVVKKMKNYWRQLLNAKLITQRKFDNLTKAERGGLSELDKAGFIKRQLVETRQITKHVAQILDSRMNTKYDENDKLIREVKVITLKSKLVSDFRKDFQFYKVREINNYHHAHDAYLNAVVGTALIKKYPKLESEFVYGDYKVYDVRKMIAKSEQEIGKATAKYFFYSMNHRVEITEGILADECAALLCYFFRMPRQVFNAQKKAQSSTDGSSGSETPGTSESATPESSGSEVEFSHEYWMRHALTLAKRARDEREVPVGAVLVLNNRVIGEGWNRAIGLHDPTAHAEIMALRQGGLVMQNYRLIDATLYVTFEPCVMCAGAMIHSRIGRVVFGVRNAKTGAAGSLMDVLHYPGNIMNFFKTEITLANGEIRKRPLIETNGETGEIVWDKGRDFATVRKVLSMPQVNIVKKTEVQTGGFSKESILPKRNSDKLIARKKDWDPKKYGGFDSPTVAYSVLVVAKVEKGKSKKLKSVKELLGITIMERSSFEKNPIDFLEAKGYKEVKKDLIIKLPKYSLFELENGRKRMLASAGELQKGNELALPSKYVNFLYLASHYEKLKGSPEDNEQKQLFVEQHKHYLDEIIEQISEFSKRVILADANLDKVLSAYNKHRDKPIREQAENIIHLFTLTNLGAPAAFKYFDTTIDRKRYTSTKEVLDATLIHQSITGLYETRIDLSQLGGD

SEQ ID NO: 299 - protein, 1554 aa, synthetic construct
  REGION 1..1554: note = 123 Cas9 TadACP139ins 1299 polypeptide sequence
MDKKYSIGLAIGTNSVGWAVITDEYKVPSKKFKVLGNTDRHSIKKNLIGALLFDSGETAEATRLKRTARRRYTRRKNRICYLQEIFSNEMAKVDDSFFHRLEESFLVEEDKKHERHPIFGNIVDEVAYHEKYPTIYHLRKKLVDSTDKADLRLIYLALAHMIKFRGHFLIEGDLNPDNSDVDKLFIQLVQTYNQLFEENPINASGVDAKAILSARLSKSRRLENLIAQLPGEKKNGLFGNLIALSLGLTPNFKSNFDLAEDAKLQLSKDTYDDDLDNLLAQIGDQYADLFLAAKNLSDAILLSDILRVNTEITKAPLSASMIKRYDEHHQDLTLLKALVRQQLPEKYKEIFFDQSKNGYAGYIDGGASQEEFYKFIKPILEKMDGTEELLVKLNREDLLRKQRTFDNGSIPHQIHLGELHAILRRQEDFYPFLKDNREKIEKILTFRIPYYVGPLARGNSRFAWMTRKSEETITPWNFEEVVDKGASAQSFIERMTNFDKNLPNEKVLPKHSLLYEYFTVYNELTKVKYVTEGMRKPAFLSGEQKKAIVDLLFKTNRKVTVKQLKEDYFKKIECFDSVEISGVEDRFNASLGTYHDLLKIIKDKDFLDNEENEDILEDIVLTLTLFEDREMIEERLKTYAHLFDDKVMKQLKRRRYTGWGRLSRKLINGIRDKQSGKTILDFLKSDGFANRNFMQLIHDDSLTFKEDIQKAQVSGQGDSLHEHIANLAGSPAIKKGILQTVKVVDELVKVMGRHKPENIVIEMARENQTTQKGQKNSRERMKRIEEGIKELGSQILKEHPVENTQLQNEKLYLYYLQNGRDMYVDQELDINRLSDYDVDHIVPQSFLKDDSIDNKVLTRSDKNRGKSDNVPSEEVVKKMKNYWRQLLNAKLITQRKFDNLTKAERGGLSELDKAGFIKRQLVETRQITKHVAQILDSRMNTKYDENDKLIREVKVITLKSKLVSDFRKDFQFYKVREINNYHHAHDAYLNAVVGTALIKKYPKLESEFVYGDYKVYDVRKMIAKSEQEIGKATAKYFFYSNIMNFFKTEITLANGEIRKRPLIETNGETGEIVWDKGRDFATVRKVLSMPQVNIVKKTEVQTGGFSKESILPKRNSDKLIARKKDWDPKKYGGFDSPTVAYSVLVVAKVEKGKSKKLKSVKELLGITIMERSSFEKNPIDFLEAKGYKEVKKDLIIKLPKYSLFELENGRKRMLASAGELQKGNELALPSKYVNFLYLASHYEKLKGSPEDNEQKQLFVEQHKHYLDEIIEQISEFSKRVILADANLDKVLSAYNKHRMNHRVEITEGILADECAALLCYFFRMPRQVFNAQKKAQSSTDGSSGSETPGTSESATPESSGSEVEFSHEYWMRHALTLAKRARDEREVPVGAVLVLNNRVIGEGWNRAIGLHDPTAHAEIMALRQGGLVMQNYRLIDATLYVTFEPCVMCAGAMIHSRIGRVVFGVRNAKTGAAGSLMDVLHYPGDKPIREQAENIIHLFTLTNLGAPAAFKYFDTTIDRKRYTSTKEVLDATLIHQSITGLYETRIDLSQLGGD

SEQ ID NO: 300 - protein, 1454 aa, synthetic construct
  REGION 1..1454: note = 124 Cas9 delta 792-872TadAins polypeptide sequence
MDKKYSIGLAIGTNSVGWAVITDEYKVPSKKFKVLGNTDRHSIKKNLIGALLFDSGETAEATRLKRTARRRYTRRKNRICYLQEIFSNEMAKVDDSFFHRLEESFLVEEDKKHERHPIFGNIVDEVAYHEKYPTIYHLRKKLVDSTDKADLRLIYLALAHMIKFRGHFLIEGDLNPDNSDVDKLFIQLVQTYNQLFEENPINASGVDAKAILSARLSKSRRLENLIAQLPGEKKNGLFGNLIALSLGLTPNFKSNFDLAEDAKLQLSKDTYDDDLDNLLAQIGDQYADLFLAAKNLSDAILLSDILRVNTEITKAPLSASMIKRYDEHHQDLTLLKALVRQQLPEKYKEIFFDQSKNGYAGYIDGGASQEEFYKFIKPILEKMDGTEELLVKLNREDLLRKQRTFDNGSIPHQIHLGELHAILRRQEDFYPFLKDNREKIEKILTFRIPYYVGPLARGNSRFAWMTRKSEETITPWNFEEVVDKGASAQSFIERMTNFDKNLPNEKVLPKHSLLYEYFTVYNELTKVKYVTEGMRKPAFLSGEQKKAIVDLLFKTNRKVTVKQLKEDYFKKIECFDSVEISGVEDRFNASLGTYHDLLKIIKDKDFLDNEENEDILEDIVLTLTLFEDREMIEERLKTYAHLFDDKVMKQLKRRRYTGWGRLSRKLINGIRDKQSGKTILDFLKSDGFANRNFMQLIHDDSLTFKEDIQKAQVSGQGDSLHEHIANLAGSPAIKKGILQTVKVVDELVKVMGRHKPENIVIEMARENQTTQKGQKNSRERMKRIEEGIKELGSEVEFSHEYWMRHALTLAKRARDEREVPVGAVLVLNNRVIGEGWNRAIGLHDPTAHAEIMALRQGGLVMQNYRLIDATLYVTFEPCVMCAGAMIHSRIGRVVFGVRNAKTGAAGSLMDVLHYPGMNHRVEITEGILADECAALLCYFFRMPRQVFNAQKKAQSSTDEEVVKKMKNYWRQLLNAKLITQRKFDNLTKAERGGLSELDKAGFIKRQLVETRQITKHVAQILDSRMNTKYDENDKLIREVKVITLKSKLVSDFRKDFQFYKVREINNYHHAHDAYLNAVVGTALIKKYPKLESEFVYGDYKVYDVRKMIAKSEQEIGKATAKYFFYSNIMNFFKTEITLANGEIRKRPLIETNGETGEIVWDKGRDFATVRKVLSMPQVNIVKKTEVQTGGFSKESILPKRNSDKLIARKKDWDPKKYGGFDSPTVAYSVLVVAKVEKGKSKKLKSVKELLGITIMERSSFEKNPIDFLEAKGYKEVKKDLIIKLPKYSLFELENGRKRMLASAGELQKGNELALPSKYVNFLYLASHYEKLKGSPEDNEQKQLFVEQHKHYLDEIIEQISEFSKRVILADANLDKVLSAYNKHRDKPIREQAENIIHLFTLTNLGAPAAFKYFDTTIDRKRYTSTKEVLDATLIHQSITGLYETRIDLSQLGGD

SEQ ID NO: 301 - protein, 1420 aa, synthetic construct
  REGION 1..1420: note = 125 Cas9 delta 792-906TadAins polypeptide sequence
MDKKYSIGLAIGTNSVGWAVITDEYKVPSKKFKVLGNTDRHSIKKNLIGALLFDSGETAEATRLKRTARRRYTRRKNRICYLQEIFSNEMAKVDDSFFHRLEESFLVEEDKKHERHPIFGNIVDEVAYHEKYPTIYHLRKKLVDSTDKADLRLIYLALAHMIKFRGHFLIEGDLNPDNSDVDKLFIQLVQTYNQLFEENPINASGVDAKAILSARLSKSRRLENLIAQLPGEKKNGLFGNLIALSLGLTPNFKSNFDLAEDAKLQLSKDTYDDDLDNLLAQIGDQYADLFLAAKNLSDAILLSDILRVNTEITKAPLSASMIKRYDEHHQDLTLLKALVRQQLPEKYKEIFFDQSKNGYAGYIDGGASQEEFYKFIKPILEKMDGTEELLVKLNREDLLRKQRTFDNGSIPHQIHLGELHAILRRQEDFYPFLKDNREKIEKILTFRIPYYVGPLARGNSRFAWMTRKSEETITPWNFEEVVDKGASAQSFIERMTNFDKNLPNEKVLPKHSLLYEYFTVYNELTKVKYVTEGMRKPAFLSGEQKKAIVDLLFKTNRKVTVKQLKEDYFKKIECFDSVEISGVEDRFNASLGTYHDLLKIIKDKDFLDNEENEDILEDIVLTLTLFEDREMIEERLKTYAHLFDDKVMKQLKRRRYTGWGRLSRKLINGIRDKQSGKTILDFLKSDGFANRNFMQLIHDDSLTFKEDIQKAQVSGQGDSLHEHIANLAGSPAIKKGILQTVKVVDELVKVMGRHKPENIVIEMARENQTTQKGQKNSRERMKRIEEGIKELGSEVEFSHEYWMRHALTLAKRARDEREVPVGAVLVLNNRVIGEGWNRAIGLHDPTAHAEIMALRQGGLVMQNYRLIDATLYVTFEPCVMCAGAMIHSRIGRVVFGVRNAKTGAAGSLMDVLHYPGMNHRVEITEGILADECAALLCYFFRMPRQVFNAQKKAQSSTDGLSELDKAGFIKRQLVETRQITKHVAQILDSRMNTKYDENDKLIREVKVITLKSKLVSDFRKDFQFYKVREINNYHHAHDAYLNAVVGTALIKKYPKLESEFVYGDYKVYDVRKMIAKSEQEIGKATAKYFFYSNIMNFFKTEITLANGEIRKRPLIETNGETGEIVWDKGRDFATVRKVLSMPQVNIVKKTEVQTGGFSKESILPKRNSDKLIARKKDWDPKKYGGFDSPTVAYSVLVVAKVEKGKSKKLKSVKELLGITIMERSSFEKNPIDFLEAKGYKEVKKDLIIKLPKYSLFELENGRKRMLASAGELQKGNELALPSKYVNFLYLASHYEKLKGSPEDNEQKQLFVEQHKHYLDEIIEQISEFSKRVILADANLDKVLSAYNKHRDKPIREQAENIIHLFTLTNLGAPAAFKYFDTTIDRKRYTSTKEVLDATLIHQSITGLYETRIDLSQLGGD

SEQ ID NO: 302 - protein, 1554 aa, synthetic construct
  REGION 1..1554: note = 126 TadA CP65ins 1003 polypeptide sequence
MDKKYSIGLAIGTNSVGWAVITDEYKVPSKKFKVLGNTDRHSIKKNLIGALLFDSGETAEATRLKRTARRRYTRRKNRICYLQEIFSNEMAKVDDSFFHRLEESFLVEEDKKHERHPIFGNIVDEVAYHEKYPTIYHLRKKLVDSTDKADLRLIYLALAHMIKFRGHFLIEGDLNPDNSDVDKLFIQLVQTYNQLFEENPINASGVDAKAILSARLSKSRRLENLIAQLPGEKKNGLFGNLIALSLGLTPNFKSNFDLAEDAKLQLSKDTYDDDLDNLLAQIGDQYADLFLAAKNLSDAILLSDILRVNTEITKAPLSASMIKRYDEHHQDLTLLKALVRQQLPEKYKEIFFDQSKNGYAGYIDGGASQEEFYKFIKPILEKMDGTEELLVKLNREDLLRKQRTFDNGSIPHQIHLGELHAILRRQEDFYPFLKDNREKIEKILTFRIPYYVGPLARGNSRFAWMTRKSEETITPWNFEEVVDKGASAQSFIERMTNFDKNLPNEKVLPKHSLLYEYFTVYNELTKVKYVTEGMRKPAFLSGEQKKAIVDLLFKTNRKVTVKQLKEDYFKKIECFDSVEISGVEDRFNASLGTYHDLLKIIKDKDFLDNEENEDILEDIVLTLTLFEDREMIEERLKTYAHLFDDKVMKQLKRRRYTGWGRLSRKLINGIRDKQSGKTILDFLKSDGFANRNFMQLIHDDSLTFKEDIQKAQVSGQGDSLHEHIANLAGSPAIKKGILQTVKVVDELVKVMGRHKPENIVIEMARENQTTQKGQKNSRERMKRIEEGIKELGSQILKEHPVENTQLQNEKLYLYYLQNGRDMYVDQELDINRLSDYDVDHIVPQSFLKDDSIDNKVLTRSDKNRGKSDNVPSEEVVKKMKNYWRQLLNAKLITQRKFDNLTKAERGGLSELDKAGFIKRQLVETRQITKHVAQILDSRMNTKYDENDKLIREVKVITLKSKLVSDFRKDFQFYKVREINNYHHAHDAYLNAVVGTALIKKYPKTAHAEIMALRQGGLVMQNYRLIDATLYVTFEPCVMCAGAMIHSRIGRVVFGVRNAKTGAAGSLMDVLHYPGMNHRVEITEGILADECAALLCYFFRMPRQVFNAQKKAQSSTDGSSGSETPGTSESATPESSGSEVEFSHEYWMRHALTLAKRARDEREVPVGAVLVLNNRVIGEGWNRAIGLHDPLESEFVYGDYKVYDVRKMIAKSEQEIGKATAKYFFYSNIMNFFKTEITLANGEIRKRPLIETNGETGEIVWDKGRDFATVRKVLSMPQVNIVKKTEVQTGGFSKESILPKRNSDKLIARKKDWDPKKYGGFDSPTVAYSVLVVAKVEKGKSKKLKSVKELLGITIMERSSFEKNPIDFLEAKGYKEVKKDLIIKLPKYSLFELENGRKRMLASAGELQKGNELALPSKYVNFLYLASHYEKLKGSPEDNEQKQLFVEQHKHYLDEIIEQISEFSKRVILADANLDKVLSAYNKHRDKPIREQAENIIHLFTLTNLGAPAAFKYFDTTIDRKRYTSTKEVLDATLIHQSITGLYETRIDLSQLGGD

SEQ ID NO: 303 - protein, 1554 aa, synthetic construct
  REGION 1..1554: note = 127 TadA CP65ins 1016 polypeptide sequence
MDKKYSIGLAIGTNSVGWAVITDEYKVPSKKFKVLGNTDRHSIKKNLIGALLFDSGETAEATRLKRTARRRYTRRKNRICYLQEIFSNEMAKVDDSFFHRLEESFLVEEDKKHERHPIFGNIVDEVAYHEKYPTIYHLRKKLVDSTDKADLRLIYLALAHMIKFRGHFLIEGDLNPDNSDVDKLFIQLVQTYNQLFEENPINASGVDAKAILSARLSKSRRLENLIAQLPGEKKNGLFGNLIALSLGLTPNFKSNFDLAEDAKLQLSKDTYDDDLDNLLAQIGDQYADLFLAAKNLSDAILLSDILRVNTEITKAPLSASMIKRYDEHHQDLTLLKALVRQQLPEKYKEIFFDQSKNGYAGYIDGGASQEEFYKFIKPILEKMDGTEELLVKLNREDLLRKQRTFDNGSIPHQIHLGELHAILRRQEDFYPFLKDNREKIEKILTFRIPYYVGPLARGNSRFAWMTRKSEETITPWNFEEVVDKGASAQSFIERMTNFDKNLPNEKVLPKHSLLYEYFTVYNELTKVKYVTEGMRKPAFLSGEQKKAIVDLLFKTNRKVTVKQLKEDYFKKIECFDSVEISGVEDRFNASLGTYHDLLKIIKDKDFLDNEENEDILEDIVLTLTLFEDREMIEERLKTYAHLFDDKVMKQLKRRRYTGWGRLSRKLINGIRDKQSGKTILDFLKSDGFANRNFMQLIHDDSLTFKEDIQKAQVSGQGDSLHEHIANLAGSPAIKKGILQTVKVVDELVKVMGRHKPENIVIEMARENQTTQKGQKNSRERMKRIEEGIKELGSQILKEHPVENTQLQNEKLYLYYLQNGRDMYVDQELDINRLSDYDVDHIVPQSFLKDDSIDNKVLTRSDKNRGKSDNVPSEEVVKKMKNYWRQLLNAKLITQRKFDNLTKAERGGLSELDKAGFIKRQLVETRQITKHVAQILDSRMNTKYDENDKLIREVKVITLKSKLVSDFRKDFQFYKVREINNYHHAHDAYLNAVVGTALIKKYPKLESEFVYGDYKVTAHAEIMALRQGGLVMQNYRLIDATLYVTFEPCVMCAGAMIHSRIGRVVFGVRNAKTGAAGSLMDVLHYPGMNHRVEITEGILADECAALLCYFFRMPRQVFNAQKKAQSSTDGSSGSETPGTSESATPESSGSEVEFSHEYWMRHALTLAKRARDEREVPVGAVLVLNNRVIGEGWNRAIGLHDPYDVRKMIAKSEQEIGKATAKYFFYSNIMNFFKTEITLANGEIRKRPLIETNGETGEIVWDKGRDFATVRKVLSMPQVNIVKKTEVQTGGFSKESILPKRNSDKLIARKKDWDPKKYGGFDSPTVAYSVLVVAKVEKGKSKKLKSVKELLGITIMERSSFEKNPIDFLEAKGYKEVKKDLIIKLPKYSLFELENGRKRMLASAGELQKGNELALPSKYVNFLYLASHYEKLKGSPEDNEQKQLFVEQHKHYLDEIIEQISEFSKRVILADANLDKVLSAYNKHRDKPIREQAENIIHLFTLTNLGAPAAFKYFDTTIDRKRYTSTKEVLDATLIHQSITGLYETRIDLSQLGGD

SEQ ID NO: 304 - protein, 1554 aa, synthetic construct
  REGION 1..1554: note = 128 TadA CP65ins 1022 polypeptide sequence
MDKKYSIGLAIGTNSVGWAVITDEYKVPSKKFKVLGNTDRHSIKKNLIGALLFDSGETAEATRLKRTARRRYTRRKNRICYLQEIFSNEMAKVDDSFFHRLEESFLVEEDKKHERHPIFGNIVDEVAYHEKYPTIYHLRKKLVDSTDKADLRLIYLALAHMIKFRGHFLIEGDLNPDNSDVDKLFIQLVQTYNQLFEENPINASGVDAKAILSARLSKSRRLENLIAQLPGEKKNGLFGNLIALSLGLTPNFKSNFDLAEDAKLQLSKDTYDDDLDNLLAQIGDQYADLFLAAKNLSDAILLSDILRVNTEITKAPLSASMIKRYDEHHQDLTLLKALVRQQLPEKYKEIFFDQSKNGYAGYIDGGASQEEFYKFIKPILEKMDGTEELLVKLNREDLLRKQRTFDNGSIPHQIHLGELHAILRRQEDFYPFLKDNREKIEKILTFRIPYYVGPLARGNSRFAWMTRKSEETITPWNFEEVVDKGASAQSFIERMTNFDKNLPNEKVLPKHSLLYEYFTVYNELTKVKYVTEGMRKPAFLSGEQKKAIVDLLFKTNRKVTVKQLKEDYFKKIECFDSVEISGVEDRFNASLGTYHDLLKIIKDKDFLDNEENEDILEDIVLTLTLFEDREMIEERLKTYAHLFDDKVMKQLKRRRYTGWGRLSRKLINGIRDKQSGKTILDFLKSDGFANRNFMQLIHDDSLTFKEDIQKAQVSGQGDSLHEHIANLAGSPAIKKGILQTVKVVDELVKVMGRHKPENIVIEMARENQTTQKGQKNSRERMKRIEEGIKELGSQILKEHPVENTQLQNEKLYLYYLQNGRDMYVDQELDINRLSDYDVDHIVPQSFLKDDSIDNKVLTRSDKNRGKSDNVPSEEVVKKMKNYWRQLLNAKLITQRKFDNLTKAERGGLSELDKAGFIKRQLVETRQITKHVAQILDSRMNTKYDENDKLIREVKVITLKSKLVSDFRKDFQFYKVREINNYHHAHDAYLNAVVGTALIKKYPKLESEFVYGDYKVYDVRKMITAHAEIMALRQGGLVMQNYRLIDATLYVTFEPCVMCAGAMIHSRIGRVVFGVRNAKTGAAGSLMDVLHYPGMNHRVEITEGILADECAALLCYFFRMPRQVFNAQKKAQSSTDGSSGSETPGTSESATPESSGSEVEFSHEYWMRHALTLAKRARDEREVPVGAVLVLNNRVIGEGWNRAIGLHDPAKSEQEIGKATAKYFFYSNIMNFFKTEITLANGEIRKRPLIETNGETGEIVWDKGRDFATVRKVLSMPQVNIVKKTEVQTGGFSKESILPKRNSDKLIARKKDWDPKKYGGFDSPTVAYSVLVVAKVEKGKSKKLKSVKELLGITIMERSSFEKNPIDFLEAKGYKEVKKDLIIKLPKYSLFELENGRKRMLASAGELQKGNELALPSKYVNFLYLASHYEKLKGSPEDNEQKQLFVEQHKHYLDEIIEQISEFSKRVILADANLDKVLSAYNKHRDKPIREQAENIIHLFTLTNLGAPAAFKYFDTTIDRKRYTSTKEVLDATLIHQSITGLYETRIDLSQLGGD

SEQ ID NO: 305 - protein, 1554 aa, synthetic construct
  REGION 1..1554: note = 129 TadA CP65ins 1029 polypeptide sequence
MDKKYSIGLAIGTNSVGWAVITDEYKVPSKKFKVLGNTDRHSIKKNLIGALLFDSGETAEATRLKRTARRRYTRRKNRICYLQEIFSNEMAKVDDSFFHRLEESFLVEEDKKHERHPIFGNIVDEVAYHEKYPTIYHLRKKLVDSTDKADLRLIYLALAHMIKFRGHFLIEGDLNPDNSDVDKLFIQLVQTYNQLFEENPINASGVDAKAILSARLSKSRRLENLIAQLPGEKKNGLFGNLIALSLGLTPNFKSNFDLAEDAKLQLSKDTYDDDLDNLLAQIGDQYADLFLAAKNLSDAILLSDILRVNTEITKAPLSASMIKRYDEHHQDLTLLKALVRQQLPEKYKEIFFDQSKNGYAGYIDGGASQEEFYKFIKPILEKMDGTEELLVKLNREDLLRKQRTFDNGSIPHQIHLGELHAILRRQEDFYPFLKDNREKIEKILTFRIPYYVGPLARGNSRFAWMTRKSEETITPWNFEEVVDKGASAQSFIERMTNFDKNLPNEKVLPKHSLLYEYFTVYNELTKVKYVTEGMRKPAFLSGEQKKAIVDLLFKTNRKVTVKQLKEDYFKKIECFDSVEISGVEDRFNASLGTYHDLLKIIKDKDFLDNEENEDILEDIVLTLTLFEDREMIEERLKTYAHLFDDKVMKQLKRRRYTGWGRLSRKLINGIRDKQSGKTILDFLKSDGFANRNFMQLIHDDSLTFKEDIQKAQVSGQGDSLHEHIANLAGSPAIKKGILQTVKVVDELVKVMGRHKPENIVIEMARENQTTQKGQKNSRERMKRIEEGIKELGSQILKEHPVENTQLQNEKLYLYYLQNGRDMYVDQELDINRLSDYDVDHIVPQSFLKDDSIDNKVLTRSDKNRGKSDNVPSEEVVKKMKNYWRQLLNAKLITQRKFDNLTKAERGGLSELDKAGFIKRQLVETRQITKHVAQILDSRMNTKYDENDKLIREVKVITLKSKLVSDFRKDFQFYKVREINNYHHAHDAYLNAVVGTALIKKYPKLESEFVYGDYKVYDVRKMIAKSEQEITAHAEIMALRQGGLVMQNYRLIDATLYVTFEPCVMCAGAMIHSRIGRVVFGVRNAKTGAAGSLMDVLHYPGMNHRVEITEGILADECAALLCYFFRMPRQVFNAQKKAQSSTDGSSGSETPGTSESATPESSGSEVEFSHEYWMRHALTLAKRARDEREVPVGAVLVLNNRVIGEGWNRAIGLHDPGKATAKYFFYSNIMNFFKTEITLANGEIRKRPLIETNGETGEIVWDKGRDFATVRKVLSMPQVNIVKKTEVQTGGFSKESILPKRNSDKLIARKKDWDPKKYGGFDSPTVAYSVLVVAKVEKGKSKKLKSVKELLGITIMERSSFEKNPIDFLEAKGYKEVKKDLIIKLPKYSLFELENGRKRMLASAGELQKGNELALPSKYVNFLYLASHYEKLKGSPEDNEQKQLFVEQHKHYLDEIIEQISEFSKRVILADANLDKVLSAYNKHRDKPIREQAENIIHLFTLTNLGAPAAFKYFDTTIDRKRYTSTKEVLDATLIHQSITGLYETRIDLSQLGGD

SEQ ID NO: 306 - protein, 1554 aa, synthetic construct
  REGION 1..1554: note = 130 TadA CP65ins 1041 polypeptide sequence
MDKKYSIGLAIGTNSVGWAVITDEYKVPSKKFKVLGNTDRHSIKKNLIGALLFDSGETAEATRLKRTARRRYTRRKNRICYLQEIFSNEMAKVDDSFFHRLEESFLVEEDKKHERHPIFGNIVDEVAYHEKYPTIYHLRKKLVDSTDKADLRLIYLALAHMIKFRGHFLIEGDLNPDNSDVDKLFIQLVQTYNQLFEENPINASGVDAKAILSARLSKSRRLENLIAQLPGEKKNGLFGNLIALSLGLTPNFKSNFDLAEDAKLQLSKDTYDDDLDNLLAQIGDQYADLFLAAKNLSDAILLSDILRVNTEITKAPLSASMIKRYDEHHQDLTLLKALVRQQLPEKYKEIFFDQSKNGYAGYIDGGASQEEFYKFIKPILEKMDGTEELLVKLNREDLLRKQRTFDNGSIPHQIHLGELHAILRRQEDFYPFLKDNREKIEKILTFRIPYYVGPLARGNSRFAWMTRKSEETITPWNFEEVVDKGASAQSFIERMTNFDKNLPNEKVLPKHSLLYEYFTVYNELTKVKYVTEGMRKPAFLSGEQKKAIVDLLFKTNRKVTVKQLKEDYFKKIECFDSVEISGVEDRFNASLGTYHDLLKIIKDKDFLDNEENEDILEDIVLTLTLFEDREMIEERLKTYAHLFDDKVMKQLKRRRYTGWGRLSRKLINGIRDKQSGKTILDFLKSDGFANRNFMQLIHDDSLTFKEDIQKAQVSGQGDSLHEHIANLAGSPAIKKGILQTVKVVDELVKVMGRHKPENIVIEMARENQTTQKGQKNSRERMKRIEEGIKELGSQILKEHPVENTQLQNEKLYLYYLQNGRDMYVDQELDINRLSDYDVDHIVPQSFLKDDSIDNKVLTRSDKNRGKSDNVPSEEVVKKMKNYWRQLLNAKLITQRKFDNLTKAERGGLSELDKAGFIKRQLVETRQITKHVAQILDSRMNTKYDENDKLIREVKVITLKSKLVSDFRKDFQFYKVREINNYHHAHDAYLNAVVGTALIKKYPKLESEFVYGDYKVYDVRKMIAKSEQEIGKATAKYFFYSTAHAEIMALRQGGLVMQNYRLIDATLYVTFEPCVMCAGAMIHSRIGRVVFGVRNAKTGAAGSLMDVLHYPGMNHRVEITEGILADECAALLCYFFRMPRQVFNAQKKAQSSTDGSSGSETPGTSESATPESSGSEVEFSHEYWMRHALTLAKRARDEREVPVGAVLVLNNRVIGEGWNRAIGLHDPNIMNFFKTEITLANGEIRKRPLIETNGETGEIVWDKGRDFATVRKVLSMPQVNIVKKTEVQTGGFSKESILPKRNSDKLIARKKDWDPKKYGGFDSPTVAYSVLVVAKVEKGKSKKLKSVKELLGITIMERSSFEKNPIDFLEAKGYKEVKKDLIIKLPKYSLFELENGRKRMLASAGELQKGNELALPSKYVNFLYLASHYEKLKGSPEDNEQKQLFVEQHKHYLDEIIEQISEFSKRVILADANLDKVLSAYNKHRDKPIREQAENIIHLFTLTNLGAPAAFKYFDTTIDRKRYTSTKEVLDATLIHQSITGLYETRIDLSQLGGD

SEQ ID NO: 307 - protein, 1554 aa, synthetic construct
  REGION 1..1554: note = 131 TadA CP65ins 1054 polypeptide sequence
MDKKYSIGLAIGTNSVGWAVITDEYKVPSKKFKVLGNTDRHSIKKNLIGALLFDSGETAEATRLKRTARRRYTRRKNRICYLQEIFSNEMAKVDDSFFHRLEESFLVEEDKKHERHPIFGNIVDEVAYHEKYPTIYHLRKKLVDSTDKADLRLIYLALAHMIKFRGHFLIEGDLNPDNSDVDKLFIQLVQTYNQLFEENPINASGVDAKAILSARLSKSRRLENLIAQLPGEKKNGLFGNLIALSLGLTPNFKSNFDLAEDAKLQLSKDTYDDDLDNLLAQIGDQYADLFLAAKNLSDAILLSDILRVNTEITKAPLSASMIKRYDEHHQDLTLLKALVRQQLPEKYKEIFFDQSKNGYAGYIDGGASQEEFYKFIKPILEKMDGTEELLVKLNREDLLRKQRTFDNGSIPHQIHLGELHAILRRQEDFYPFLKDNREKIEKILTFRIPYYVGPLARGNSRFAWMTRKSEETITPWNFEEVVDKGASAQSFIERMTNFDKNLPNEKVLPKHSLLYEYFTVYNELTKVKYVTEGMRKPAFLSGEQKKAIVDLLFKTNRKVTVKQLKEDYFKKIECFDSVEISGVEDRFNASLGTYHDLLKIIKDKDFLDNEENEDILEDIVLTLTLFEDREMIEERLKTYAHLFDDKVMKQLKRRRYTGWGRLSRKLINGIRDKQSGKTILDFLKSDGFANRNFMQLIHDDSLTFKEDIQKAQVSGQGDSLHEHIANLAGSPAIKKGILQTVKVVDELVKVMGRHKPENIVIEMARENQTTQKGQKNSRERMKRIEEGIKELGSQILKEHPVENTQLQNEKLYLYYLQNGRDMYVDQELDINRLSDYDVDHIVPQSFLKDDSIDNKVLTRSDKNRGKSDNVPSEEVVKKMKNYWRQLLNAKLITQRKFDNLTKAERGGLSELDKAGFIKRQLVETRQITKHVAQILDSRMNTKYDENDKLIREVKVITLKSKLVSDFRKDFQFYKVREINNYHHAHDAYLNAVVGTALIKKYPKLESEFVYGDYKVYDVRKMIAKSEQEIGKATAKYFFYSNIMNFFKTEITLANTAHAEIMALRQGGLVMQNYRLIDATLYVTFEPCVMCAGAMIHSRIGRVVFGVRNAKTGAAGSLMDVLHYPGMNHRVEITEGILADECAALLCYFFRMPRQVFNAQKKAQSSTDGSSGSETPGTSESATPESSGSEVEFSHEYWMRHALTLAKRARDEREVPVGAVLVLNNRVIGEGWNRAIGLHDPGEIRKRPLIETNGETGEIVWDKGRDFATVRKVLSMPQVNIVKKTEVQTGGFSKESILPKRNSDKLIARKKDWDPKKYGGFDSPTVAYSVLVVAKVEKGKSKKLKSVKELLGITIMERSSFEKNPIDFLEAKGYKEVKKDLIIKLPKYSLFELENGRKRMLASAGELQKGNELALPSKYVNFLYLASHYEKLKGSPEDNEQKQLFVEQHKHYLDEIIEQISEFSKRVILADANLDKVLSAYNKHRDKPIREQAENIIHLFTLTNLGAPAAFKYFDTTIDRKRYTSTKEVLDATLIHQSITGLYETRIDLSQLGGD

SEQ ID NO: 308 - protein, 1554 aa, synthetic construct
  REGION 1..1554: note = 132 TadA CP65ins 1246 polypeptide sequence
MDKKYSIGLAIGTNSVGWAVITDEYKVPSKKFKVLGNTDRHSIKKNLIGALLFDSGETAEATRLKRTARRRYTRRKNRICYLQEIFSNEMAKVDDSFFHRLEESFLVEEDKKHERHPIFGNIVDEVAYHEKYPTIYHLRKKLVDSTDKADLRLIYLALAHMIKFRGHFLIEGDLNPDNSDVDKLFIQLVQTYNQLFEENPINASGVDAKAILSARLSKSRRLENLIAQLPGEKKNGLFGNLIALSLGLTPNFKSNFDLAEDAKLQLSKDTYDDDLDNLLAQIGDQYADLFLAAKNLSDAILLSDILRVNTEITKAPLSASMIKRYDEHHQDLTLLKALVRQQLPEKYKEIFFDQSKNGYAGYIDGGASQEEFYKFIKPILEKMDGTEELLVKLNREDLLRKQRTFDNGSIPHQIHLGELHAILRRQEDFYPFLKDNREKIEKILTFRIPYYVGPLARGNSRFAWMTRKSEETITPWNFEEVVDKGASAQSFIERMTNFDKNLPNEKVLPKHSLLYEYFTVYNELTKVKYVTEGMRKPAFLSGEQKKAIVDLLFKTNRKVTVKQLKEDYFKKIECFDSVEISGVEDRFNASLGTYHDLLKIIKDKDFLDNEENEDILEDIVLTLTLFEDREMIEERLKTYAHLFDDKVMKQLKRRRYTGWGRLSRKLINGIRDKQSGKTILDFLKSDGFANRNFMQLIHDDSLTFKEDIQKAQVSGQGDSLHEHIANLAGSPAIKKGILQTVKVVDELVKVMGRHKPENIVIEMARENQTTQKGQKNSRERMKRIEEGIKELGSQILKEHPVENTQLQNEKLYLYYLQNGRDMYVDQELDINRLSDYDVDHIVPQSFLKDDSIDNKVLTRSDKNRGKSDNVPSEEVVKKMKNYWRQLLNAKLITQRKFDNLTKAERGGLSELDKAGFIKRQLVETRQITKHVAQILDSRMNTKYDENDKLIREVKVITLKSKLVSDFRKDFQFYKVREINNYHHAHDAYLNAVVGTALIKKYPKLESEFVYGDYKVYDVRKMIAKSEQEIGKATAKYFFYSNIMNFFKTEITLANGEIRKRPLIETNGETGEIVWDKGRDFATVRKVLSMPQVNIVKKTEVQTGGFSKESILPKRNSDKLIARKKDWDPKKYGGFDSPTVAYSVLVVAKVEKGKSKKLKSVKELLGITIMERSSFEKNPIDFLEAKGYKEVKKDLIIKLPKYSLFELENGRKRMLASAGELQKGNELALPSKYVNFLYLASHYEKLKGTAHAEIMALRQGGLVMQNYRLIDATLYVTFEPCVMCAGAMIHSRIGRVVFGVRNAKTGAAGSLMDVLHYPGMNHRVEITEGILADECAALLCYFFRMPRQVFNAQKKAQSSTDGSSGSETPGTSESATPESSGSEVEFSHEYWMRHALTLAKRARDEREVPVGAVLVLNNRVIGEGWNRAIGLHDPSPEDNEQKQLFVEQHKHYLDEIIEQISEFSKRVILADANLDKVLSAYNKHRDKPIREQAENIIHLFTLTNLGAPAAFKYFDTTIDRKRYTSTKEVLDATLIHQSITGLYETRIDLSQLGGD

SEQ ID NO: 309 - protein, 160 aa, Staphylococcus aureus
  REGION 1..160: note = MISC_FEATURE - TadA polypeptide sequence
MGSHMTNDIYFMTLAIEEAKKAAQLGEVPIGAIITKDDEVIARAHNLRETLQQPTAHAEHIAIERAAKVLGSWRLEGCTLYVTLEPCVMCAGTIVMSRIPRVVYGADDPKGGCSGSLMNLLQQSNFNHRAIVDKGVLKEACSTLLTTFFKNLRANKKSTN

SEQ ID NO: 310 - protein, 161 aa, Bacillus subtilis
  REGION 1..161: note = MISC_FEATURE - TadA polypeptide sequence
MTQDELYMKEAIKEAKKAEEKGEVPIGAVLVINGEIIARAHNLRETEQRSIAHAEMLVIDEACKALGTWRLEGATLYVTLEPCPMCAGAVVLSRVEKVVFGAFDPKGGCSGTLMNLLQEERFNHQAEVVSGVLEEECGGMLSAFFRELRKKKKAARKNLSE

SEQ ID NO: 311 - protein, 183 aa, Salmonella typhimurium
  REGION 1..183: note = MISC_FEATURE - TadA polypeptide sequence
MPPAFITGVTSLSDVELDHEYWMRHALTLAKRAWDEREVPVGAVLVHNHRVIGEGWNRPIGRHDPTAHAEIMALRQGGLVLQNYRLLDTTLYVTLEPCVMCAGAMVHSRIGRVVFGARDAKTGAAGSLIDVLHHPGMNHRVEIIEGVLRDECATLLSDFFRMRRQEIKALKKADRAEGAGPAV

SEQ ID NO: 312 - protein, 164 aa, Shewanella putrefaciens
  REGION 1..164: note = MISC_FEATURE - TadA polypeptide sequence
MDEYWMQVAMQMAEKAEAAGEVPVGAVLVKDGQQIATGYNLSISQHDPTAHAEILCLRSAGKKLENYRLLDATLYITLEPCAMCAGAMVHSRIARVVYGARDEKTGAAGTVVNLLQHPAFNHQVEVTSGVLAEACSAQLSRFFKRRRDEKKALKLAQRAQQGIE

SEQ ID NO: 313 - protein, 173 aa, Haemophilus influenzae
  REGION 1..173: note = MISC_FEATURE - TadA polypeptide sequence
MDAAKVRSEFDEKMMRYALELADKAEALGEIPVGAVLVDDARNIIGEGWNLSIVQSDPTAHAEIIALRNGAKNIQNYRLLNSTLYVTLEPCTMCAGAILHSRIKRLVFGASDYKTGAIGSRFHFFDDYKMNHTLEITSGVLAEECSQKLSTFFQKRREEKKIEKALLKSLSDK

SEQ ID NO: 314 - protein, 161 aa, Caulobacter crescentus
  REGION 1..161: note = MISC_FEATURE - TadA polypeptide sequence
MRTDESEDQDHRMMRLALDAARAAAEAGETPVGAVILDPSTGEVIATAGNGPIAAHDPTAHAEIAAMRAAAAKLGNYRLTDLTLVVTLEPCAMCAGAISHARIGRVVFGADDPKGGAVVHGPKFFAQPTCHWRPEVTGGVLADESADLLRGFFRARRKAKI

SEQ ID NO: 315 - protein, 179 aa, Geobacter sulfurreducens
  REGION 1..179: note = MISC_FEATURE - TadA polypeptide sequence
MSSLKKTPIRDDAYWMGKAIREAAKAAARDEVPIGAVIVRDGAVIGRGHNLREGSNDPSAHAEMIAIRQAARRSANWRLTGATLYVTLEPCLMCMGAIILARLERVVFGCYDPKGGAAGSLYDLSADPRLNHQVRLSPGVCQEECGTMLSDFFRDLRRRKKAKATPALFIDERKVPPEP

SEQ ID NO: 316 - protein, 167 aa, synthetic construct
  REGION 1..167: note = TadA*8 polypeptide sequence
MSEVEFSHEYWMRHALTLAKRARDEREVPVGAVLVLNNRVIGEGWNRAIGLHDPTAHAEIMALRQGGLVMQNYRLIDATLYVTFEPCVMCAGAMIHSRIGRVVFGVRNAKTGAAGSLMDVLHYPGMNHRVEITEGILADECAALLCTFFRMPRQVFNAQKKAQSSTD

SEQ ID NO: 317 - RNA, 80 nt, synthetic construct
  misc_feature 1..80: note = gRNA scaffold polynucleotide sequence
  source 1..80: mol_type = other RNA
gttttagagctagaaatagcaagttaaaataaggctagtccgttatcaacttgaaaaagtggcaccgagtcggtgctttt

SEQ ID NO: 318 - RNA, 125 nt, synthetic construct
  misc_feature 1..125: note = gRNA scaffold polynucleotide sequence
  source 1..125: mol_type = other RNA
gtttttgtactctcaagatttaagtaactgtacaacgaaacttacacagttacttaaatcttgcagaagctacaaagataaggcttcatgccgaaatcaacaccctgtcattttatggcagggtg

SEQ ID NO: 319 - RNA, 76 nt, Streptococcus pyogenes
  misc_feature 1..76: note = S. pyogenes gRNA scaffold oligonucleotide sequence
  source 1..76: mol_type = other RNA
gttttagagctagaaatagcaagttaaaataaggctagtccgttatcaacttgaaaaagtggcaccgagtcggtgc

SEQ ID NO: 320 - RNA, 84 nt, Staphylococcus aureus
  misc_feature 1..84: note = S. aureus gRNA scaffold oligonucleotide sequence
  source 1..84: mol_type = other RNA
gttttagtactctgtaatgaaaattacagaatctactaaaacaaggcaaaatgccgtgtttatctcgtcaacttgttggcgaga

SEQ ID NO: 321 - RNA, 97 nt, Bacillus hisashii
  misc_feature 1..97: note = BhCas12b gRNA scaffold oligonucleotide sequence
  source 1..97: mol_type = other RNA
gttctgtcttttggtcaggacaaccgtctagctataagtgctgcagggtgtgagaaactcctattgctggacgatgtctcttacgaggcattagcac

SEQ ID NO: 322 - RNA, 88 nt, Bacillus sp.
  misc_feature 1..88: note = BvCas12b gRNA scaffold oligonucleotide sequence
  source 1..88: mol_type = other RNA
gacctatagggtcaatgaatctgtgcgtgtgccataagtaattaaaaattacccaccacaggagcacctgaaaacaggtgcttggcac

SEQ ID NO: 323 - RNA, 80 nt, synthetic construct
  misc_feature 1..80: note = gRNA scaffold nucleotide sequence; oligonucleotide sequence
  modified_base 78..80: mod_base = um
  misc_feature 78..80: note = In embodiments, a nucleotide(s) is linked to the preceding 5' nucleotide by a 3' phosphorothioate internucleotide linkage
  source 1..80: mol_type = other RNA
gttttagagctagaaatagcaagttaaaataaggctagtccgttatcaacttgaaaaagtgggaccgagtcggtgctttt

SEQ ID NO: 324 - RNA, 80 nt, synthetic construct; identical to SEQ ID NO: 317
  misc_feature 1..80: note = gRNA scaffold nucleotide sequence
  misc_feature 78..80: note = In embodiments, a nucleotide(s) is linked to the preceding 5' nucleotide by a 3' phosphorothioate internucleotide linkage
  modified_base 78..80: mod_base = um
  source 1..80: mol_type = other RNA

SEQ ID NO: 325 - RNA, 117 nt, Bacillus hisashii
  misc_feature 1..117: note = BhCas12b gRNA scaffold + guide sequence; oligonucleotide sequence
  misc_feature 1..97: note = BhCas12b sgRNA scaffold
  source 1..117: mol_type = other RNA
gttctgtcttttggtcaggacaaccgtctagctataagtgctgcagggtgtgagaaactcctattgctggacgatgtctcttacgaggcattagcacnnnnnnnnnnnnnnnnnnnn

SEQ ID NO: 326 - RNA, 108 nt, Bacillus sp.
  misc_feature 1..108: note = BvCas12b gRNA scaffold + guide sequence; oligonucleotide sequence
  misc_feature 1..88: note = BvCas12b gRNA scaffold
  source 1..108: mol_type = other RNA
gacctatagggtcaatgaatctgtgcgtgtgccataagtaattaaaaattacccaccacaggagcacctgaaaacaggtgcttggcacnnnnnnnnnnnnnnnnnnnn

SEQ ID NO: 327 - RNA, 119 nt, Alicyclobacillus acidiphilus
  misc_feature 1..119: note = AaCas12b gRNA scaffold + guide sequence; oligonucleotide sequence
  misc_feature 1..99: note = AaCas12b gRNA scaffold
  source 1..119: mol_type = other RNA
gtctaaaggacagaatttttcaacgggtgtgccaatggccactttccaggtggcaaagcccgttgaacttctcaaaaagaacgatctgagaagtggcacnnnnnnnnnnnnnnnnnnnn

SEQ ID NO: 328 - protein, 29 aa, synthetic construct
  REGION 1..29: note = synthetic polypeptide sequence
PKKKRKVEGADKRTADGSEFESPKKKRKV

SEQ ID NO: 329 - protein, 23 aa, synthetic construct
  REGION 1..23: note = synthetic peptide sequence
RKSGKIAAIVVKRPRKPKKKRKV

SEQ ID NO: 330 - protein, 8 aa, synthetic construct
  REGION 1..8: note = synthetic peptide sequence
SGGSSGGS

SEQ ID NO: 331 - protein, 1609 aa, synthetic construct
  REGION 1..1609: note = pNMG-B335ABE8.1_Y147T_CP5_NGC PAM_monomer polypeptide sequence
MSEVEFSHEYWMRHALTLAKRARDEREVPVGAVLVLNNRVIGEGWNRAIGLHDPTAHAEIMALRQGGLVMQNYRLIDATLYVTFEPCVMCAGAMIHSRIGRVVFGVRNAKTGAAGSLMDVLHYPGMNHRVEITEGILADECAALLCTFFRMPRQVFNAQKKAQSSTDSGGSSGGSSGSETPGTSESATPESSGGSSGGSEIGKATAKYFFYSNIMNFFKTEITLANGEIRKRPLIETNGETGEIVWDKGRDFATVRKVLSMPQVNIVKKTEVQTGGFSKESILPKRNSDKLIARKKDWDPKKYGGFMQPTVAYSVLVVAKVEKGKSKKLKSVKELLGITIMERSSFEKNPIDFLEAKGYKEVKKDLIIKLPKYSLFELENGRKRMLASAKFLQKGNELALPSKYVNFLYLASHYEKLKGSPEDNEQKQLFVEQHKHYLDEIIEQISEFSKRVILADANLDKVLSAYNKHRDKPIREQAENIIHLFTLTNLGAPRAFKYFDTTIARKEYRSTKEVLDATLIHQSITGLYETRIDLSQLGGDGGSGGSGGSGGSGGSGGSGGMDKKYSIGLAIGTNSVGWAVITDEYKVPSKKFKVLGNTDRHSIKKNLIGALLFDSGETAEATRLKRTARRRYTRRKNRICYLQEIFSNEMAKVDDSFFHRLEESFLVEEDKKHERHPIFGNIVDEVAYHEKYPTIYHLRKKLVDSTDKADLRLIYLALAHMIKFRGHFLIEGDLNPDNSDVDKLFIQLVQTYNQLFEENPINASGVDAKAILSARLSKSRRLENLIAQLPGEKKNGLFGNLIALSLGLTPNFKSNFDLAEDAKLQLSKDTYDDDLDNLLAQIGDQYADLFLAAKNLSDAILLSDILRVNTEITKAPLSASMIKRYDEHHQDLTLLKALVRQQLPEKYKEIFFDQSKNGYAGYIDGGASQEEFYKFIKPILEKMDGTEELLVKLNREDLLRKQRTFDNGSIPHQIHLGELHAILRRQEDFYPFLKDNREKIEKILTFRIPYYVGPLARGNSRFAWMTRKSEETITPWNFEEVVDKGASAQSFIERMTNFDKNLPNEKVLPKHSLLYEYFTVYNELTKVKYVTEGMRKPAFLSGEQKKAIVDLLFKTNRKVTVKQLKEDYFKKIECFDSVEISGVEDRFNASLGTYHDLLKIIKDKDFLDNEENEDILEDIVLTLTLFEDREMIEERLKTYAHLFDDKVMKQLKRRRYTGWGRLSRKLINGIRDKQSGKTILDFLKSDGFANRNFMQLIHDDSLTFKEDIQKAQVSGQGDSLHEHIANLAGSPAIKKGILQTVKVVDELVKVMGRHKPENIVIEMARENQTTQKGQKNSRERMKRIEEGIKELGSQILKEHPVENTQLQNEKLYLYYLQNGRDMYVDQELDINRLSDYDVDHIVPQSFLKDDSIDNKVLTRSDKNRGKSDNVPSEEVVKKMKNYWRQLLNAKLITQRKFDNLTKAERGGLSELDKAGFIKRQLVETRQITKHVAQILDSRMNTKYDENDKLIREVKVITLKSKLVSDFRKDFQFYKVREINNYHHAHDAYLNAVVGTALIKKYPKLESEFVYGDYKVYDVRKMIAKSEQEGADKRTADGSEFESPKKKRKV

SEQ ID NO: 332 - protein, 1807 aa, synthetic construct
  REGION 1..1807: note = pNMG-357_ABE8.14 with NGC PAMCP5 polypeptide sequence
  REGION 1..174: note = MISC_FEATURE - Adenosine deaminase sequence
  REGION 175..198: note = MISC_FEATURE - Linker sequence
  REGION 199..365: note = MISC_FEATURE - Adenosine deaminase sequence
  REGION 366..397: note = MISC_FEATURE - Linker sequence
  REGION 398..738: note = MISC_FEATURE - Sequence derived from Cas9
  REGION 739..759: note = MISC_FEATURE - Linker sequence
  REGION 760..1785: note = MISC_FEATURE - Sequence derived from Cas9
  REGION 1786..1807: note = MISC_FEATURE - Bipartite nuclear localization sequence
MSEVEFSHEYWMRHALTLAKRAWDEREVPVGAVLVHNNRVIGEGWNRPIGRHDPTAHAEIMALRQGGLVMQNYRLIDATLYVTLEPCVMCAGAMIHSRIGRVVFGARDAKTGAAGSLMDVLHHPGMNHRVEITEGILADECAALLSDFFRMRRQEIKAQKKAQSSTDGGSSGGSSGSETPGTSESATPESSGGSSGGSMSEVEFSHEYWMRHALTLAKRARDEREVPVGAVLVLNNRVIGEGWNRAIGLHDPTAHAEIMALRQGGLVMQNYRLIDATLYVTFEPCVMCAGAMIHSRIGRVVFGVRNAKTGAAGSLMDVLHYPGMNHRVEITEGILADECAALLCTFFRMPRQVFNAQKKAQSSTDSGGSSGGSSGSETPGTSESATPESSGGSSGGSEIGKATAKYFFYSNIMNFFKTEITLANGEIRKRPLIETNGETGEIVWDKGRDFATVRKVLSMPQVNIVKKTEVQTGGFSKESILPKRNSDKLIARKKDWDPKKYGGFMQPTVAYSVLVVAKVEKGKSKKLKSVKELLGITIMERSSFEKNPIDFLEAKGYKEVKKDLIIKLPKYSLFELENGRKRMLASAKFLQKGNELALPSKYVNFLYLASHYEKLKGSPEDNEQKQLFVEQHKHYLDEIIEQISEFSKRVILADANLDKVLSAYNKHRDKPIREQAENIIHLFTLTNLGAPRAFKYFDTTIARKEYRSTKEVLDATLIHQSITGLYETRIDLSQLGGDGGSGGSGGSGGSGGSGGSGGMDKKYSIGLAIGTNSVGWAVITDEYKVPSKKFKVLGNTDRHSIKKNLIGALLFDSGETAEATRLKRTARRRYTRRKNRICYLQEIFSNEMAKVDDSFFHRLEESFLVEEDKKHERHPIFGNIVDEVAYHEKYPTIYHLRKKLVDSTDKADLRLIYLALAHMIKFRGHFLIEGDLNPDNSDVDKLFIQLVQTYNQLFEENPINASGVDAKAILSARLSKSRRLENLIAQLPGEKKNGLFGNLIALSLGLTPNFKSNFDLAEDAKLQLSKDTYDDDLDNLLAQIGDQYADLFLAAKNLSDAILLSDILRVNTEITKAPLSASMIKRYDEHHQDLTLLKALVRQQLPEKYKEIFFDQSKNGYAGYIDGGASQEEFYKFIKPILEKMDGTEELLVKLNREDLLRKQRTFDNGSIPHQIHLGELHAILRRQEDFYPFLKDNREKIEKILTFRIPYYVGPLARGNSRFAWMTRKSEETITPWNFEEVVDKGASAQSFIERMTNFDKNLPNEKVLPKHSLLYEYFTVYNELTKVKYVTEGMRKPAFLSGEQKKAIVDLLFKTNRKVTVKQLKEDYFKKIECFDSVEISGVEDRFNASLGTYHDLLKIIKDKDFLDNEENEDILEDIVLTLTLFEDREMIEERLKTYAHLFDDKVMKQLKRRRYTGWGRLSRKLINGIRDKQSGKTILDFLKSDGFANRNFMQLIHDDSLTFKEDIQKAQVSGQGDSLHEHIANLAGSPAIKKGILQTVKVVDELVKVMGRHKPENIVIEMARENQTTQKGQKNSRERMKRIEEGIKELGSQILKEHPVENTQLQNEKLYLYYLQNGRDMYVDQELDINRLSDYDVDHIVPQSFLKDDSIDNKVLTRSDKNRGKSDNVPSEEVVKKMKNYWRQLLNAKLITQRKFDNLTKAERGGLSELDKAGFIKRQLVETRQITKHVAQILDSRMNTKYDENDKLIREVKVITLKSKLVSDFRKDFQFYKVREINNYHHAHDAYLNAVVGTALIKKYPKLESEFVYGDYKVYDVRKMIAKSEQEGADKRTADGSEFESPKKKRKV

SEQ ID NO: 333 - protein, 1588 aa, synthetic construct
  REGION 1..1588: note = ABE8.8-m polypeptide sequence
  REGION 1..167: note = MISC_FEATURE - Adenosine deaminase sequence
  REGION 168..199: note = MISC_FEATURE - Linker sequence
  REGION 200..1566: note = MISC_FEATURE - Sequence derived from Cas9
  REGION 1567..1588: note = MISC_FEATURE - Bipartite nuclear localization sequence
MSEVEFSHEYWMRHALTLAKRARDEREVPVGAVLVLNNRVIGEGWNRAIGLHDPTAHAEIMALRQGGLVMQNYRLIDATLYVTFEPCVMCAGAMIHSRIGRVVFGVRNAKTGAAGSLMDVLHHPGMNHRVEITEGILADECAALLCRFFRMPRRVFNAQKKAQSSTDSGGSSGGSSGSETPGTSESATPESSGGSSGGSDKKYSIGLAIGTNSVGWAVITDEYKVPSKKFKVLGNTDRHSIKKNLIGALLFDSGETAEATRLKRTARRRYTRRKNRICYLQEIFSNEMAKVDDSFFHRLEESFLVEEDKKHERHPIFGNIVDEVAYHEKYPTIYHLRKKLVDSTDKADLRLIYLALAHMIKFRGHFLIEGDLNPDNSDVDKLFIQLVQTYNQLFEENPINASGVDAKAILSARLSKSRRLENLIAQLPGEKKNGLFGNLIALSLGLTPNFKSNFDLAEDAKLQLSKDTYDDDLDNLLAQIGDQYADLFLAAKNLSDAILLSDILRVNTEITKAPLSASMIKRYDEHHQDLTLLKALVRQQLPEKYKEIFFDQSKNGYAGYIDGGASQEEFYKFIKPILEKMDGTEELLVKLNREDLLRKQRTFDNGSIPHQIHLGELHAILRRQEDFYPFLKDNREKIEKILTFRIPYYVGPLARGNSRFAWMTRKSEETITPWNFEEVVDKGASAQSFIERMTNFDKNLPNEKVLPKHSLLYEYFTVYNELTKVKYVTEGMRKPAFLSGEQKKAIVDLLFKTNRKVTVKQLKEDYFKKIECFDSVEISGVEDRFNASLGTYHDLLKIIKDKDFLDNEENEDILEDIVLTLTLFEDREMIEERLKTYAHLFDDKVMKQLKRRRYTGWGRLSRKLINGIRDKQSGKTILDFLKSDGFANRNFMQLIHDDSLTFKEDIQKAQVSGQGDSLHEHIANLAGSPAIKKGILQTVKVVDELVKVMGRHKPENIVIEMARENQTTQKGQKNSRERMKRIEEGIKELGSQILKEHPVENTQLQNEKLYLYYLQNGRDMYVDQELDINRLSDYDVDHIVPQSFLKDDSIDNKVLTRSDKNRGKSDNVPSEEVVKKMKNYWRQLLNAKLITQRKFDNLTKAERGGLSELDKAGFIKRQLVETRQITKHVAQILDSRMNTKYDENDKLIREVKVITLKSKLVSDFRKDFQFYKVREINNYHHAHDAYLNAVVGTALIKKYPKLESEFVYGDYKVYDVRKMIAKSEQEIGKATAKYFFYSNIMNFFKTEITLANGEIRKRPLIETNGETGEIVWDKGRDFATVRKVLSMPQVNIVKKTEVQTGGFSKESILPKRNSDKLIARKKDWDPKKYGGFDSPTVAYSVLVVAKVEKGKSKKLKSVKELLGITIMERSSFEKNPIDFLEAKGYKEVKKDLIIKLPKYSLFELENGRKRMLASAGELQKGNELALPSKYVNFLYLASHYEKLKGSPEDNEQKQLFVEQHKHYLDEIIEQISEFSKRVILADANLDKVLSAYNKHRDKPIREQAENIIHLFTLTNLGAPAAFKYFDTTIDRKRYTSTKEVLDATLIHQSITGLYETRIDLSQLGGDEGADKRTADGSEFESPKKKRKV

SEQ ID NO: 334 - protein, 1786 aa, synthetic construct
  REGION 1..1786: note = ABE8.8-d polypeptide sequence
  REGION 1..167: note = MISC_FEATURE - Adenosine deaminase sequence
  REGION 168..199: note = MISC_FEATURE - Linker sequence
  REGION 200..365: note = MISC_FEATURE - Adenosine deaminase sequence
  REGION 366..397: note = MISC_FEATURE - Linker sequence
  REGION 398..1764: note = MISC_FEATURE - Sequence derived from Cas9
  REGION 1765..1786: note = MISC_FEATURE - Bipartite nuclear localization sequence
MSEVEFSHEYWMRHALTLAKRAWDEREVPVGAVLVHNNRVIGEGWNRPIGRHDPTAHAEIMALRQGGLVMQNYRLIDATLYVTLEPCVMCAGAMIHSRIGRVVFGARDAKTGAAGSLMDVLHHPGMNHRVEITEGILADECAALLSDFFRMRRQEIKAQKKAQSSTDSGGSSGGSSGSETPGTSESATPESSGGSSGGSSEVEFSHEYWMRHALTLAKRARDEREVPVGAVLVLNNRVIGEGWNRAIGLHDPTAHAEIMALRQGGLVMQNYRLIDATLYVTFEPCVMCAGAMIHSRIGRVVFGVRNAKTGAAGSLMDVLHHPGMNHRVEITEGILADECAALLCRFFRMPRRVFNAQKKAQSSTDSGGSSGGSSGSETPGTSESATPESSGGSSGGSDKKYSIGLAIGTNSVGWAVITDEYKVPSKKFKVLGNTDRHSIKKNLIGALLFDSGETAEATRLKRTARRRYTRRKNRICYLQEIFSNEMAKVDDSFFHRLEESFLVEEDKKHERHPIFGNIVDEVAYHEKYPTIYHLRKKLVDSTDKADLRLIYLALAHMIKFRGHFLIEGDLNPDNSDVDKLFIQLVQTYNQLFEENPINASGVDAKAILSARLSKSRRLENLIAQLPGEKKNGLFGNLIALSLGLTPNFKSNFDLAEDAKLQLSKDTYDDDLDNLLAQIGDQYADLFLAAKNLSDAILLSDILRVNTEITKAPLSASMIKRYDEHHQDLTLLKALVRQQLPEKYKEIFFDQSKNGYAGYIDGGASQEEFYKFIKPILEKMDGTEELLVKLNREDLLRKQRTFDNGSIPHQIHLGELHAILRRQEDFYPFLKDNREKIEKILTFRIPYYVGPLARGNSRFAWMTRKSEETITPWNFEEVVDKGASAQSFIERMTNFDKNLPNEKVLPKHSLLYEYFTVYNELTKVKYVTEGMRKPAFLSGEQKKAIVDLLFKTNRKVTVKQLKEDYFKKIECFDSVEISGVEDRFNASLGTYHDLLKIIKDKDFLDNEENEDILEDIVLTLTLFEDREMIEERLKTYAHLFDDKVMKQLKRRRYTGWGRLSRKLINGIRDKQSGKTILDFLKSDGFANRNFMQLIHDDSLTFKEDIQKAQVSGQGDSLHEHIANLAGSPAIKKGILQTVKVVDELVKVMGRHKPENIVIEMARENQTTQKGQKNSRERMKRIEEGIKELGSQILKEHPVENTQLQNEKLYLYYLQNGRDMYVDQELDINRLSDYDVDHIVPQSFLKDDSIDNKVLTRSDKNRGKSDNVPSEEVVKKMKNYWRQLLNAKLITQRKFDNLTKAERGGLSELDKAGFIKRQLVETRQITKHVAQILDSRMNTKYDENDKLIREVKVITLKSKLVSDFRKDFQFYKVREINNYHHAHDAYLNAVVGTALIKKYPKLESEFVYGDYKVYDVRKMIAKSEQEIGKATAKYFFYSNIMNFFKTEITLANGEIRKRPLIETNGETGEIVWDKGRDFATVRKVLSMPQVNIVKKTEVQTGGFSKESILPKRNSDKLIARKKDWDPKKYGGFDSPTVAYSVLVVAKVEKGKSKKLKSVKELLGITIMERSSFEKNPIDFLEAKGYKEVKKDLIIKLPKYSLFELENGRKRMLASAGELQKGNELALPSKYVNFLYLASHYEKLKGSPEDNEQKQLFVEQHKHYLDEIIEQISEFSKRVILADANLDKVLSAYNKHRDKPIREQAENIIHLFTLTNLGAPAAFKYFDTTIDRKRYTSTKEVLDATLIHQSITGLYETRIDLSQLGGDEGADKRTADGSEFESPKKKRKV

SEQ ID NO: 335 - protein, 1588 aa, synthetic construct
  REGION 1..1588: note = ABE8.13-m polypeptide sequence
  REGION 1..167: note = MISC_FEATURE - Adenosine deaminase sequence
  REGION 168..199: note = MISC_FEATURE - Linker sequence
  REGION 200..1566: note = MISC_FEATURE - Sequence derived from Cas9
  REGION 1567..1588: note = MISC_FEATURE - Bipartite nuclear localization sequence
MSEVEFSHEYWMRHALTLAKRARDEREVPVGAVLVLNNRVIGEGWNRAIGLHDPTAHAEIMALRQGGLVMQNYRLYDATLYVTFEPCVMCAGAMIHSRIGRVVFGVRNAKTGAAGSLMDVLHHPGMNHRVEITEGILADECAALLCRFFRMPRRVFNAQKKAQSSTDSGGSSGGSSGSETPGTSESATPESSGGSSGGSDKKYSIGLAIGTNSVGWAVITDEYKVPSKKFKVLGNTDRHSIKKNLIGALLFDSGETAEATRLKRTARRRYTRRKNRICYLQEIFSNEMAKVDDSFFHRLEESFLVEEDKKHERHPIFGNIVDEVAYHEKYPTIYHLRKKLVDSTDKADLRLIYLALAHMIKFRGHFLIEGDLNPDNSDVDKLFIQLVQTYNQLFEENPINASGVDAKAILSARLSKSRRLENLIAQLPGEKKNGLFGNLIALSLGLTPNFKSNFDLAEDAKLQLSKDTYDDDLDNLLAQIGDQYADLFLAAKNLSDAILLSDILRVNTEITKAPLSASMIKRYDEHHQDLTLLKALVRQQLPEKYKEIFFDQSKNGYAGYIDGGASQEEFYKFIKPILEKMDGTEELLVKLNREDLLRKQRTFDNGSIPHQIHLGELHAILRRQEDFYPFLKDNREKIEKILTFRIPYYVGPLARGNSRFAWMTRKSEETITPWNFEEVVDKGASAQSFIERMTNFDKNLPNEKVLPKHSLLYEYFTVYNELTKVKYVTEGMRKPAFLSGEQKKAIVDLLFKTNRKVTVKQLKEDYFKKIECFDSVEISGVEDRFNASLGTYHDLLKIIKDKDFLDNEENEDILEDIVLTLTLFEDREMIEERLKTYAHLFDDKVMKQLKRRRYTGWGRLSRKLINGIRDKQSGKTILDFLKSDGFANRNFMQLIHDDSLTFKEDIQKAQVSGQGDSLHEHIANLAGSPAIKKGILQTVKVVDELVKVMGRHKPENIVIEMARENQTTQKGQKNSRERMKRIEEGIKELGSQILKEHPVENTQLQNEKLYLYYLQNGRDMYVDQELDINRLSDYDVDHIVPQSFLKDDSIDNKVLTRSDKNRGKSDNVPSEEVVKKMKNYWRQLLNAKLITQRKFDNLTKAERGGLSELDKAGFIKRQLVETRQITKHVAQILDSRMNTKYDENDKLIREVKVITLKSKLVSDFRKDFQFYKVREINNYHHAHDAYLNAVVGTALIKKYPKLESEFVYGDYKVYDVRKMIAKSEQEIGKATAKYFFYSNIMNFFKTEITLANGEIRKRPLIETNGETGEIVWDKGRDFATVRKVLSMPQVNIVKKTEVQTGGFSKESILPKRNSDKLIARKKDWDPKKYGGFDSPTVAYSVLVVAKVEKGKSKKLKSVKELLGITIMERSSFEKNPIDFLEAKGYKEVKKDLIIKLPKYSLFELENGRKRMLASAGELQKGNELALPSKYVNFLYLASHYEKLKGSPEDNEQKQLFVEQHKHYLDEIIEQISEFSKRVILADANLDKVLSAYNKHRDKPIREQAENIIHLFTLTNLGAPAAFKYFDTTIDRKRYTSTKEVLDATLIHQSITGLYETRIDLSQLGGDEGADKRTADGSEFESPKKKRKV

SEQ ID NO: 336 - protein, 1786 aa, synthetic construct
  REGION 1..1786: note = ABE8.13-d polypeptide sequence
  REGION 1..167: note = MISC_FEATURE - Adenosine deaminase sequence
  REGION 168..199: note = MISC_FEATURE - Linker sequence
  REGION 200..365: note = MISC_FEATURE - Adenosine deaminase sequence
  REGION 366..397: note = MISC_FEATURE - Linker sequence
  REGION 398..1764: note = MISC_FEATURE - Sequence derived from Cas9
  REGION 1765..1786: note = MISC_FEATURE - Bipartite nuclear localization sequence
MSEVEFSHEYWMRHALTLAKRAWDEREVPVGAVLVHNNRVIGEGWNRPIGRHDPTAHAEIMALRQGGLVMQNYRLIDATLYVTLEPCVMCAGAMIHSRIGRVVFGARDAKTGAAGSLMDVLHHPGMNHRVEITEGILADECAALLSDFFRMRRQEIKAQKKAQSSTDSGGSSGGSSGSETPGTSESATPESSGGSSGGSSEVEFSHEYWMRHALTLAKRARDEREVPVGAVLVLNNRVIGEGWNRAIGLHDPTAHAEIMALRQGGLVMQNYRLYDATLYVTFEPCVMCAGAMIHSRIGRVVFGVRNAKTGAAGSLMDVLHHPGMNHRVEITEGILADECAALLCRFFRMPRRVFNAQKKAQSSTDSGGSSGGSSGSETPGTSESATPESSGGSSGGSDKKYSIGLAIGTNSVGWAVITDEYKVPSKKFKVLGNTDRHSIKKNLIGALLFDSGETAEATRLKRTARRRYTRRKNRICYLQEIFSNEMAKVDDSFFHRLEESFLVEEDKKHERHPIFGNIVDEVAYHEKYPTIYHLRKKLVDSTDKADLRLIYLALAHMIKFRGHFLIEGDLNPDNSDVDKLFIQLVQTYNQLFEENPINASGVDAKAILSARLSKSRRLENLIAQLPGEKKNGLFGNLIALSLGLTPNFKSNFDLAEDAKLQLSKDTYDDDLDNLLAQIGDQYADLFLAAKNLSDAILLSDILRVNTEITKAPLSASMIKRYDEHHQDLTLLKALVRQQLPEKYKEIFFDQSKNGYAGYIDGGASQEEFYKFIKPILEKMDGTEELLVKLNREDLLRKQRTFDNGSIPHQIHLGELHAILRRQEDFYPFLKDNREKIEKILTFRIPYYVGPLARGNSRFAWMTRKSEETITPWNFEEVVDKGASAQSFIERMTNFDKNLPNEKVLPKHSLLYEYFTVYNELTKVKYVTEGMRKPAFLSGEQKKAIVDLLFKTNRKVTVKQLKEDYFKKIECFDSVEISGVEDRFNASLGTYHDLLKIIKDKDFLDNEENEDILEDIVLTLTLFEDREMIEERLKTYAHLFDDKVMKQLKRRRYTGWGRLSRKLINGIRDKQSGKTILDFLKSDGFANRNFMQLIHDDSLTFKEDIQKAQVSGQGDSLHEHIANLAGSPAIKKGILQTVKVVDELVKVMGRHKPENIVIEMARENQTTQKGQKNSRERMKRIEEGIKELGSQILKEHPVENTQLQNEKLYLYYLQNGRDMYVDQELDINRLSDYDVDHIVPQSFLKDDSIDNKVLTRSDKNRGKSDNVPSEEVVKKMKNYWRQLLNAKLITQRKFDNLTKAERGGLSELDKAGFIKRQLVETRQITKHVAQILDSRMNTKYDENDKLIREVKVITLKSKLVSDFRKDFQFYKVREINNYHHAHDAYLNAVVGTALIKKYPKLESEFVYGDYKVYDVRKMIAKSEQEIGKATAKYFFYSNIMNFFKTEITLANGEIRKRPLIETNGETGEIVWDKGRDFATVRKVLSMPQVNIVKKTEVQTGGFSKESILPKRNSDKLIARKKDWDPKKYGGFDSPTVAYSVLVVAKVEKGKSKKLKSVKELLGITIMERSSFEKNPIDFLEAKGYKEVKKDLIIKLPKYSLFELENGRKRMLASAGELQKGNELALPSKYVNFLYLASHYEKLKGSPEDNEQKQLFVEQHKHYLDEIIEQISEFSKRVILADANLDKVLSAYNKHRDKPIREQAENIIHLFTLTNLGAPAAFKYFDTTIDRKRYTSTKEVLDATLIHQSITGLYETRIDLSQLGGDEGADKRTADGSEFESPKKKRKV

SEQ ID NO: 337 - protein, 1588 aa, synthetic construct
  REGION 1..1588: note = ABE8.17-m polypeptide sequence
  REGION 1..167: note = MISC_FEATURE - Adenosine deaminase sequence
  REGION 168..199: note = MISC_FEATURE - Linker sequence
  REGION 200..1566: note = MISC_FEATURE - Sequence derived from Cas9
  REGION 1567..1588: note = MISC_FEATURE - Bipartite nuclear localization sequence
MSEVEFSHEYWMRHALTLAKRARDEREVPVGAVLVLNNRVIGEGWNRAIGLHDPTAHAEIMALRQGGLVMQNYRLIDATLYSTFEPCVMCAGAMIHSRIGRVVFGVRNAKTGAAGSLMDVLHYPGMNHRVEITEGILADECAALLCYFFRMPRRVFNAQKKAQSSTDSGGSSGGSSGSETPGTSESATPESSGGSSGGSDKKYSIGLAIGTNSVGWAVITDEYKVPSKKFKVLGNTDRHSIKKNLIGALLFDSGETAEATRLKRTARRRYTRRKNRICYLQEIFSNEMAKVDDSFFHRLEESFLVEEDKKHERHPIFGNIVDEVAYHEKYPTIYHLRKKLVDSTDKADLRLIYLALAHMIKFRGHFLIEGDLNPDNSDVDKLFIQLVQTYNQLFEENPINASGVDAKAILSARLSKSRRLENLIAQLPGEKKNGLFGNLIALSLGLTPNFKSNFDLAEDAKLQLSKDTYDDDLDNLLAQIGDQYADLFLAAKNLSDAILLSDILRVNTEITKAPLSASMIKRYDEHHQDLTLLKALVRQQLPEKYKEIFFDQSKNGYAGYIDGGASQEEFYKFIKPILEKMDGTEELLVKLNREDLLRKQRTFDNGSIPHQIHLGELHAILRRQEDFYPFLKDNREKIEKILTFRIPYYVGPLARGNSRFAWMTRKSEETITPWNFEEVVDKGASAQSFIERMTNFDKNLPNEKVLPKHSLLYEYFTVYNELTKVKYVTEGMRKPAFLSGEQKKAIVDLLFKTNRKVTVKQLKEDYFKKIECFDSVEISGVEDRFNASLGTYHDLLKIIKDKDFLDNEENEDILEDIVLTLTLFEDREMIEERLKTYAHLFDDKVMKQLKRRRYTGWGRLSRKLINGIRDKQSGKTILDFLKSDGFANRNFMQLIHDDSLTFKEDIQKAQVSGQGDSLHEHIANLAGSPAIKKGILQTVKVVDELVKVMGRHKPENIVIEMARENQTTQKGQKNSRERMKRIEEGIKELGSQILKEHPVENTQLQNEKLYLYYLQNGRDMYVDQELDINRLSDYDVDHIVPQSFLKDDSIDNKVLTRSDKNRGKSDNVPSEEVVKKMKNYWRQLLNAKLITQRKFDNLTKAERGGLSELDKAGFIKRQLVETRQITKHVAQILDSRMNTKYDENDKLIREVKVITLKSKLVSDFRKDFQFYKVREINNYHHAHDAYLNAVVGTALIKKYPKLESEFVYGDYKVYDVRKMIAKSEQEIGKATAKYFFYSNIMNFFKTEITLANGEIRKRPLIETNGETGEIVWDKGRDFATVRKVLSMPQVNIVKKTEVQTGGFSKESILPKRNSDKLIARKKDWDPKKYGGFDSPTVAYSVLVVAKVEKGKSKKLKSVKELLGITIMERSSFEKNPIDFLEAKGYKEVKKDLIIKLPKYSLFELENGRKRMLASAGELQKGNELALPSKYVNFLYLASHYEKLKGSPEDNEQKQLFVEQHKHYLDEIIEQISEFSKRVILADANLDKVLSAYNKHRDKPIREQAENIIHLFTLTNLGAPAAFKYFDTTIDRKRYTSTKEVLDATLIHQSITGLYETRIDLSQLGGDEGADKRTADGSEFESPKKKRKV

SEQ ID NO: 338 - protein, 1786 aa, synthetic construct
  REGION 1..1786: note = ABE8.17-d polypeptide sequence
  REGION 1..167: note = MISC_FEATURE - Adenosine deaminase sequence
  REGION 168..199: note = MISC_FEATURE - Linker sequence
  REGION 200..365: note = MISC_FEATURE - Adenosine deaminase sequence
  REGION 366..397: note = MISC_FEATURE - Linker sequence
  REGION 398..1764: note = MISC_FEATURE - Sequence derived from Cas9
  REGION 1765..1786: note = MISC_FEATURE - Bipartite nuclear localization sequence
MSEVEFSHEYWMRHALTLAKRAWDEREVPVGAVLVHNNRVIGEGWNRPIGRHDPTAHAEIMALRQGGLVMQNYRLIDATLYVTLEPCVMCAGAMIHSRIGRVVFGARDAKTGAAGSLMDVLHHPGMNHRVEITEGILADECAALLSDFFRMRRQEIKAQKKAQSSTDSGGSSGGSSGSETPGTSESATPESSGGSSGGSSEVEFSHEYWMRHALTLAKRARDEREVPVGAVLVLNNRVIGEGWNRAIGLHDPTAHAEIMALRQGGLVMQNYRLIDATLYSTFEPCVMCAGAMIHSRIGRVVFGVRNAKTGAAGSLMDVLHYPGMNHRVEITEGILADECAALLCYFFRMPRRVFNAQKKAQSSTDSGGSSGGSSGSETPGTSESATPESSGGSSGGSDKKYSIGLAIGTNSVGWAVITDEYKVPSKKFKVLGNTDRHSIKKNLIGALLFDSGETAEATRLKRTARRRYTRRKNRICYLQEIFSNEMAKVDDSFFHRLEESFLVEEDKKHERHPIFGNIVDEVAYHEKYPTIYHLRKKLVDSTDKADLRLIYLALAHMIKFRGHFLIEGDLNPDNSDVDKLFIQLVQTYNQLFEENPINASGVDAKAILSARLSKSRRLENLIAQLPGEKKNGLFGNLIALSLGLTPNFKSNFDLAEDAKLQLSKDTYDDDLDNLLAQIGDQYADLFLAAKNLSDAILLSDILRVNTEITKAPLSASMIKRYDEHHQDLTLLKALVRQQLPEKYKEIFFDQSKNGYAGYIDGGASQEEFYKFIKPILEKMDGTEELLVKLNREDLLRKQRTFDNGSIPHQIHLGELHAILRRQEDFYPFLKDNREKIEKILTFRIPYYVGPLARGNSRFAWMTRKSEETITPWNFEEVVDKGASAQSFIERMTNFDKNLPNEKVLPKHSLLYEYFTVYNELTKVKYVTEGMRKPAFLSGEQKKAIVDLLFKTNRKVTVKQLKEDYFKKIECFDSVEISGVEDRFNASLGTYHDLLKIIKDKDFLDNEENEDILEDIVLTLTLFEDREMIEERLKTYAHLFDDKVMKQLKRRRYTGWGRLSRKLINGIRDKQSGKTILDFLKSDGFANRNFMQLIHDDSLTFKEDIQKAQVSGQGDSLHEHIANLAGSPAIKKGILQTVKVVDELVKVMGRHKPENIVIEMARENQTTQKGQKNSRERMKRIEEGIKELGSQILKEHPVENTQLQNEKLYLYYLQNGRDMYVDQELDINRLSDYDVDHIVPQSFLKDDSIDNKVLTRSDKNRGKSDNVPSEEVVKKMKNYWRQLLNAKLITQRKFDNLTKAERGGLSELDKAGFIKRQLVETRQITKHVAQILDSRMNTKYDENDKLIREVKVITLKSKLVSDFRKDFQFYKVREINNYHHAHDAYLNAVVGTALIKKYPKLESEFVYGDYKVYDVRKMIAKSEQEIGKATAKYFFYSNIMNFFKTEITLANGEIRKRPLIETNGETGEIVWDKGRDFATVRKVLSMPQVNIVKKTEVQTGGFSKESILPKRNSDKLIARKKDWDPKKYGGFDSPTVAYSVLVVAKVEKGKSKKLKSVKELLGITIMERSSFEKNPIDFLEAKGYKEVKKDLIIKLPKYSLFELENGRKRMLASAGELQKGNELALPSKYVNFLYLASHYEKLKGSPEDNEQKQLFVEQHKHYLDEIIEQISEFSKRVILADANLDKVLSAYNKHRDKPIREQAENIIHLFTLTNLGAPAAFKYFDTTIDRKRYTSTKEVLDATLIHQSITGLYETRIDLSQLGGDEGADKRTADGSEFESPKKKRKV

SEQ ID NO: 339 - protein, 1588 aa, synthetic construct
  REGION 1..1588: note = ABE8.20-m polypeptide sequence
  REGION 1..167: note = MISC_FEATURE - Adenosine deaminase sequence
  REGION 168..199: note = MISC_FEATURE - Linker sequence
  REGION 200..1566: note = MISC_FEATURE - Sequence derived from Cas9
  REGION 1567..1588: note = MISC_FEATURE - Bipartite nuclear localization sequence
MSEVEFSHEYWMRHALTLAKRARDEREVPVGAVLVLNNRVIGEGWNRAIGLHDPTAHAEIMALRQGGLVMQNYRLYDATLYSTFEPCVMCAGAMIHSRIGRVVFGVRNAKTGAAGSLMDVLHHPGMNHRVEITEGILADECAALLCRFFRMPRRVFNAQKKAQSSTDSGGSSGGSSGSETPGTSESATPESSGGSSGGSDKKYSIGLAIGTNSVGWAVITDEYKVPSKKFKVLGNTDRHSIKKNLIGALLFDSGETAEATRLKRTARRRYTRRKNRICYLQEIFSNEMAKVDDSFFHRLEESFLVEEDKKHERHPIFGNIVDEVAYHEKYPTIYHLRKKLVDSTDKADLRLIYLALAHMIKFRGHFLIEGDLNPDNSDVDKLFIQLVQTYNQLFEENPINASGVDAKAILSARLSKSRRLENLIAQLPGEKKNGLFGNLIALSLGLTPNFKSNFDLAEDAKLQLSKDTYDDDLDNLLAQIGDQYADLFLAAKNLSDAILLSDILRVNTEITKAPLSASMIKRYDEHHQDLTLLKALVRQQLPEKYKEIFFDQSKNGYAGYIDGGASQEEFYKFIKPILEKMDGTEELLVKLNREDLLRKQRTFDNGSIPHQIHLGELHAILRRQEDFYPFLKDNREKIEKILTFRIPYYVGPLARGNSRFAWMTRKSEETITPWNFEEVVDKGASAQSFIERMTNFDKNLPNEKVLPKHSLLYEYFTVYNELTKVKYVTEGMRKPAFLSGEQKKAIVDLLFKTNRKVTVKQLKEDYFKKIECFDSVEISGVEDRFNASLGTYHDLLKIIKDKDFLDNEENEDILEDIVLTLTLFEDREMIEERLKTYAHLFDDKVMKQLKRRRYTGWGRLSRKLINGIRDKQSGKTILDFLKSDGFANRNFMQLIHDDSLTFKEDIQKAQVSGQGDSLHEHIANLAGSPAIKKGILQTVKVVDELVKVMGRHKPENIVIEMARENQTTQKGQKNSRERMKRIEEGIKELGSQILKEHPVENTQLQNEKLYLYYLQNGRDMYVDQELDINRLSDYDVDHIVPQSFLKDDSIDNKVLTRSDKNRGKSDNVPSEEVVKKMKNYWRQLLNAKLITQRKFDNLTKAERGGLSELDKAGFIKRQLVETRQITKHVAQILDSRMNTKYDENDKLIREVKVITLKSKLVSDFRKDFQFYKVREINNYHHAHDAYLNAVVGTALIKKYPKLESEFVYGDYKVYDVRKMIAKSEQEIGKATAKYFFYSNIMNFFKTEITLANGEIRKRPLIETNGETGEIVWDKGRDFATVRKVLSMPQVNIVKKTEVQTGGFSKESILPKRNSDKLIARKKDWDPKKYGGFDSPTVAYSVLVVAKVEKGKSKKLKSVKELLGITIMERSSFEKNPIDFLEAKGYKEVKKDLIIKLPKYSLFELENGRKRMLASAGELQKGNELALPSKYVNFLYLASHYEKLKGSPEDNEQKQLFVEQHKHYLDEIIEQISEFSKRVILADANLDKVLSAYNKHRDKPIREQAENIIHLFTLTNLGAPAAFKYFDTTIDRKRYTSTKEVLDATLIHQSITGLYETRIDLSQLGGDEGADKRTADGSEFESPKKKRKV

SEQ ID NO: 340 - protein, 1786 aa, synthetic construct
  REGION 1..1786: note = ABE8.20-d polypeptide sequence
  REGION 1..167: note = MISC_FEATURE - Adenosine deaminase sequence
  REGION 168..199: note = MISC_FEATURE - Linker sequence
  REGION 200..365: note = MISC_FEATURE - Adenosine deaminase sequence
  REGION 366..397: note = MISC_FEATURE - Linker sequence
  REGION 398..1764: note = MISC_FEATURE - Sequence derived from Cas9
  REGION 1765..1786: note = MISC_FEATURE - Bipartite nuclear localization sequence
MSEVEFSHEYWMRHALTLAKRAWDEREVPVGAVLVHNNRVIGEGWNRPIGRHDPTAHAEIMALRQGGLVMQNYRLIDATLYVTLEPCVMCAGAMIHSRIGRVVFGARDAKTGAAGSLMDVLHHPGMNHRVEITEGILADECAALLSDFFRMRRQEIKAQKKAQSSTDSGGSSGGSSGSETPGTSESATPESSGGSSGGSSEVEFSHEYWMRHALTLAKRARDEREVPVGAVLVLNNRVIGEGWNRAIGLHDPTAHAEIMALRQGGLVMQNYRLYDATLYSTFEPCVMCAGAMIHSRIGRVVFGVRNAKTGAAGSLMDVLHHPGMNHRVEITEGILADECAALLCRFFRMPRRVFNAQKKAQSSTDSGGSSGGSSGSETPGTSESATPESSGGSSGGSDKKYSIGLAIGTNSVGWAVITDEYKVPSKKFKVLGNTDRHSIKKNLIGALLFDSGETAEATRLKRTARRRYTRRKNRICYLQEIFSNEMAKVDDSFFHRLEESFLVEEDKKHERHPIFGNIVDEVAYHEKYPTIYHLRKKLVDSTDKADLRLIYLALAHMIKFRGHFLIEGDLNPDNSDVDKLFIQLVQTYNQLFEENPINASGVDAKAILSARLSKSRRLENLIAQLPGEKKNGLFGNLIALSLGLTPNFKSNFDLAEDAKLQLSKDTYDDDLDNLLAQIGDQYADLFLAAKNLSDAILLSDILRVNTEITKAPLSASMIKRYDEHHQDLTLLKALVRQQLPEKYKEIFFDQSKNGYAGYIDGGASQEEFYKFIKPILEKMDGTEELLVKLNREDLLRKQRTFDNGSIPHQIHLGELHAILRRQEDFYPFLKDNREKIEKILTFRIPYYVGPLARGNSRFAWMTRKSEETITPWNFEEVVDKGASAQSFIERMTNFDKNLPNEKVLPKHSLLYEYFTVYNELTKVKYVTEGMRKPAFLSGEQKKAIVDLLFKTNRKVTVKQLKEDYFKKIECFDSVEISGVEDRFNASLGTYHDLLKIIKDKDFLDNEENEDILEDIVLTLTLFEDREMIEERLKTYAHLFDDKVMKQLKRRRYTGWGRLSRKLINGIRDKQSGKTILDFLKSDGFANRNFMQLIHDDSLTFKEDIQKAQVSGQGDSLHEHIANLAGSPAIKKGILQTVKVVDELVKVMGRHKPENIVIEMARENQTTQKGQKNSRERMKRIEEGIKELGSQILKEHPVENTQLQNEKLYLYYLQNGRDMYVDQELDINRLSDYDVDHIVPQSFLKDDSIDNKVLTRSDKNRGKSDNVPSEEVVKKMKNYWRQLLNAKLITQRKFDNLTKAERGGLSELDKAGFIKRQLVETRQITKHVAQILDSRMNTKYDENDKLIREVKVITLKSKLVSDFRKDFQFYKVREINNYHHAHDAYLNAVVGTALIKKYPKLESEFVYGDYKVYDVRKMIAKSEQEIGKATAKYFFYSNIMNFFKTEITLANGEIRKRPLIETNGETGEIVWDKGRDFATVRKVLSMPQVNIVKKTEVQTGGFSKESILPKRNSDKLIARKKDWDPKKYGGFDSPTVAYSVLVVAKVEKGKSKKLKSVKELLGITIMERSSFEKNPIDFLEAKGYKEVKKDLIIKLPKYSLFELENGRKRMLASAGELQKGNELALPSKYVNFLYLASHYEKLKGSPEDNEQKQLFVEQHKHYLDEIIEQISEFSKRVILADANLDKVLSAYNKHRDKPIREQAENIIHLFTLTNLGAPAAFKYFDTTIDRKRYTSTKEVLDATLIHQSITGLYETRIDLSQLGGDEGADKRTADGSEFESPKKKRKV

SEQ ID NO: 341 - protein, 1588 aa, synthetic construct
  REGION 1..1588: note = 01. monoABE8.1_bpNLS + Y147T polypeptide sequence
MSEVEFSHEYWMRHALTLAKRARDEREVPVGAVLVLNNRVIGEGWNRAIGLHDPTAHAEIMALRQGGLVMQNYRLIDATLYVTFEPCVMCAGAMIHSRIGRVVFGVRNAKTGAAGSLMDVLHYPGMNHRVEITEGILADECAALLCTFFRMPRQVFNAQKKAQSSTDSGGSSGGSSGSETPGTSESATPESSGGSSGGSDKKYSIGLAIGTNSVGWAVITDEYKVPSKKFKVLGNTDRHSIKKNLIGALLFDSGETAEATRLKRTARRRYTRRKNRICYLQEIFSNEMAKVDDSFFHRLEESFLVEEDKKHERHPIFGNIVDEVAYHEKYPTIYHLRKKLVDSTDKADLRLIYLALAHMIKFRGHFLIEGDLNPDNSDVDKLFIQLVQTYNQLFEENPINASGVDAKAILSARLSKSRRLENLIAQLPGEKKNGLFGNLIALSLGLTPNFKSNFDLAEDAKLQLSKDTYDDDLDNLLAQIGDQYADLFLAAKNLSDAILLSDILRVNTEITKAPLSASMIKRYDEHHQDLTLLKALVRQQLPEKYKEIFFDQSKNGYAGYIDGGASQEEFYKFIKPILEKMDGTEELLVKLNREDLLRKQRTFDNGSIPHQIHLGELHAILRRQEDFYPFLKDNREKIEKILTFRIPYYVGPLARGNSRFAWMTRKSEETITPWNFEEVVDKGASAQSFIERMTNFDKNLPNEKVLPKHSLLYEYFTVYNELTKVKYVTEGMRKPAFLSGEQKKAIVDLLFKTNRKVTVKQLKEDYFKKIECFDSVEISGVEDRFNASLGTYHDLLKIIKDKDFLDNEENEDILEDIVLTLTLFEDREMIEERLKTYAHLFDDKVMKQLKRRRYTGWGRLSRKLINGIRDKQSGKTILDFLKSDGFANRNFMQLIHDDSLTFKEDIQKAQVSGQGDSLHEHIANLAGSPAIKKGILQTVKVVDELVKVMGRHKPENIVIEMARENQTTQKGQKNSRERMKRIEEGIKELGSQILKEHPVENTQLQNEKLYLYYLQNGRDMYVDQELDINRLSDYDVDHIVPQSFLKDDSIDNKVLTRSDKNRGKSDNVPSEEVVKKMKNYWRQLLNAKLITQRKFDNLTKAERGGLSELDKAGFIKRQLVETRQITKHVAQILDSRMNTKYDENDKLIREVKVITLKSKLVSDFRKDFQFYKVREINNYHHAHDAYLNAVVGTALIKKYPKLESEFVYGDYKVYDVRKMIAKSEQEIGKATAKYFFYSNIMNFFKTEITLANGEIRKRPLIETNGETGEIVWDKGRDFATVRKVLSMPQVNIVKKTEVQTGGFSKESILPKRNSDKLIARKKDWDPKKYGGFVSPTVAYSVLVVAKVEKGKSKKLKSVKELLGITIMERSSFEKNPIDFLEAKGYKEVKKDLIIKLPKYSLFELENGRKRMLASARELQKGNELALPSKYVNFLYLASHYEKLKGSPEDNEQKQLFVEQHKHYLDEIIEQISEFSKRVILADANLDKVLSAYNKHRDKPIREQAENIIHLFTLTNLGAPAAFKYFDTTIDRKQYRSTKEVLDATLIHQSITGLYETRIDLSQLGGDEGADKRTADGSEFESPKKKRKV

SEQ ID NO: 342 - protein, 1588 aa, synthetic construct
  REGION 1..1588: note = 02. monoABE8.1_bpNLS + Y147R polypeptide sequence
MSEVEFSHEYWMRHALTLAKRARDEREVPVGAVLVLNNRVIGEGWNRAIGLHDPTAHAEIMALRQGGLVMQNYRLIDATLYVTFEPCVMCAGAMIHSRIGRVVFGVRNAKTGAAGSLMDVLHYPGMNHRVEITEGILADECAALLCRFFRMPRQVFNAQKKAQSSTDSGGSSGGSSGSETPGTSESATPESSGGSSGGSDKKYSIGLAIGTNSVGWAVITDEYKVPSKKFKVLGNTDRHSIKKNLIGALLFDSGETAEATRLKRTARRRYTRRKNRICYLQEIFSNEMAKVDDSFFHRLEESFLVEEDKKHERHPIFGNIVDEVAYHEKYPTIYHLRKKLVDSTDKADLRLIYLALAHMIKFRGHFLIEGDLNPDNSDVDKLFIQLVQTYNQLFEENPINASGVDAKAILSARLSKSRRLENLIAQLPGEKKNGLFGNLIALSLGLTPNFKSNFDLAEDAKLQLSKDTYDDDLDNLLAQIGDQYADLFLAAKNLSDAILLSDILRVNTEITKAPLSASMIKRYDEHHQDLTLLKALVRQQLPEKYKEIFFDQSKNGYAGYIDGGASQEEFYKFIKPILEKMDGTEELLVKLNREDLLRKQRTFDNGSIPHQIHLGELHAILRRQEDFYPFLKDNREKIEKILTFRIPYYVGPLARGNSRFAWMTRKSEETITPWNFEEVVDKGASAQSFIERMTNFDKNLPNEKVLPKHSLLYEYFTVYNELTKVKYVTEGMRKPAFLSGEQKKAIVDLLFKTNRKVTVKQLKEDYFKKIECFDSVEISGVEDRFNASLGTYHDLLKIIKDKDFLDNEENEDILEDIVLTLTLFEDREMIEERLKTYAHLFDDKVMKQLKRRRYTGWGRLSRKLINGIRDKQSGKTILDFLKSDGFANRNFMQLIHDDSLTFKEDIQKAQVSGQGDSLHEHIANLAGSPAIKKGILQTVKVVDELVKVMGRHKPENIVIEMARENQTTQKGQKNSRERMKRIEEGIKELGSQILKEHPVENTQLQNEKLYLYYLQNGRDMYVDQELDINRLSDYDVDHIVPQSFLKDDSIDNKVLTRSDKNRGKSDNVPSEEVVKKMKNYWRQLLNAKLITQRKFDNLTKAERGGLSELDKAGFIKRQLVETRQITKHVAQILDSRMNTKYDENDKLIREVKVITLKSKLVSDFRKDFQFYKVREINNYHHAHDAYLNAVVGTALIKKYPKLESEFVYGDYKVYDVRKMIAKSEQEIGKATAKYFFYSNIMNFFKTEITLANGEIRKRPLIETNGETGEIVWDKGRDFATVRKVLSMPQVNIVKKTEVQTGGFSKESILPKRNSDKLIARKKDWDPKKYGGFVSPTVAYSVLVVAKVEKGKSKKLKSVKELLGITIMERSSFEKNPIDFLEAKGYKEVKKDLIIKLPKYSLFELENGRKRMLASARELQKGNELALPSKYVNFLYLASHYEKLKGSPEDNEQKQLFVEQHKHYLDEIIEQISEFSKRVILADANLDKVLSAYNKHRDKPIREQAENIIHLFTLTNLGAPAAFKYFDTTIDRKQYRSTKEVLDATLIHQSITGLYETRIDLSQLGGDEGADKRTADGSEFESPKKKRKV

SEQ ID NO: 343 - protein, 1588 aa, synthetic construct
  REGION 1..1588: note = 03. monoABE8.1_bpNLS + Q154S polypeptide sequence
MSEVEFSHEYWMRHALTLAKRARDEREVPVGAVLVLNNRVIGEGWNRAIGLHDPTAHAEIMALRQGGLVMQNYRLIDATLYVTFEPCVMCAGAMIHSRIGRVVFGVRNAKTGAAGSLMDVLHYPGMNHRVEITEGILADECAALLCYFFRMPRSVFNAQKKAQSSTDSGGSSGGSSGSETPGTSESATPESSGGSSGGSDKKYSIGLAIGTNSVGWAVITDEYKVPSKKFKVLGNTDRHSIKKNLIGALLFDSGETAEATRLKRTARRRYTRRKNRICYLQEIFSNEMAKVDDSFFHRLEESFLVEEDKKHERHPIFGNIVDEVAYHEKYPTIYHLRKKLVDSTDKADLRLIYLALAHMIKFRGHFLIEGDLNPDNSDVDKLFIQLVQTYNQLFEENPINASGVDAKAILSARLSKSRRLENLIAQLPGEKKNGLFGNLIALSLGLTPNFKSNFDLAEDAKLQLSKDTYDDDLDNLLAQIGDQYADLFLAAKNLSDAILLSDILRVNTEITKAPLSASMIKRYDEHHQDLTLLKALVRQQLPEKYKEIFFDQSKNGYAGYIDGGASQEEFYKFIKPILEKMDGTEELLVKLNREDLLRKQRTFDNGSIPHQIHLGELHAILRRQEDFYPFLKDNREKIEKILTFRIPYYVGPLARGNSRFAWMTRKSEETITPWNFEEVVDKGASAQSFIERMTNFDKNLPNEKVLPKHSLLYEYFTVYNELTKVKYVTEGMRKPAFLSGEQKKAIVDLLFKTNRKVTVKQLKEDYFKKIECFDSVEISGVEDRFNASLGTYHDLLKIIKDKDFLDNEENEDILEDIVLTLTLFEDREMIEERLKTYAHLFDDKVMKQLKRRRYTGWGRLSRKLINGIRDKQSGKTILDFLKSDGFANRNFMQLIHDDSLTFKEDIQKAQVSGQGDSLHEHIANLAGSPAIKKGILQTVKVVDELVKVMGRHKPENIVIEMARENQTTQKGQKNSRERMKRIEEGIKELGSQILKEHPVENTQLQNEKLYLYYLQNGRDMYVDQELDINRLSDYDVDHIVPQSFLKDDSIDNKVLTRSDKNRGKSDNVPSEEVVKKMKNYWRQLLNAKLITQRKFDNLTKAERGGLSELDKAGFIKRQLVETRQITKHVAQILDSRMNTKYDENDKLIREVKVITLKSKLVSDFRKDFQFYKVREINNYHHAHDAYLNAVVGTALIKKYPKLESEFVYGDYKVYDVRKMIAKSEQEIGKATAKYFFYSNIMNFFKTEITLANGEIRKRPLIETNGETGEIVWDKGRDFATVRKVLSMPQVNIVKKTEVQTGGFSKESILPKRNSDKLIARKKDWDPKKYGGFVSPTVAYSVLVVAKVEKGKSKKLKSVKELLGITIMERSSFEKNPIDFLEAKGYKEVKKDLIIKLPKYSLFELENGRKRMLASARELQKGNELALPSKYVNFLYLASHYEKLKGSPEDNEQKQLFVEQHKHYLDEIIEQISEFSKRVILADANLDKVLSAYNKHRDKPIREQAENIIHLFTLTNLGAPAAFKYFDTTIDRKQYRSTKEVLDATLIHQSITGLYETRIDLSQLGGDEGADKRTADGSEFESPKKKRKV

SEQ ID NO: 344 - protein, 1588 aa, synthetic construct
  REGION 1..1588: note = 04. monoABE8.1_bpNLS + Y123H polypeptide sequence
MSEVEFSHEYWMRHALTLAKRARDEREVPVGAVLVLNNRVIGEGWNRAIGLHDPTAHAEIMALRQGGLVMQNYRLIDATLYVTFEPCVMCAGAMIHSRIGRVVFGVRNAKTGAAGSLMDVLHHPGMNHRVEITEGILADECAALLCYFFRMPRQVFNAQKKAQSSTDSGGSSGGSSGSETPGTSESATPESSGGSSGGSDKKYSIGLAIGTNSVGWAVITDEYKVPSKKFKVLGNTDRHSIKKNLIGALLFDSGETAEATRLKRTARRRYTRRKNRICYLQEIFSNEMAKVDDSFFHRLEESFLVEEDKKHERHPIFGNIVDEVAYHEKYPTIYHLRKKLVDSTDKADLRLIYLALAHMIKFRGHFLIEGDLNPDNSDVDKLFIQLVQTYNQLFEENPINASGVDAKAILSARLSKSRRLENLIAQLPGEKKNGLFGNLIALSLGLTPNFKSNFDLAEDAKLQLSKDTYDDDLDNLLAQIGDQYADLFLAAKNLSDAILLSDILRVNTEITKAPLSASMIKRYDEHHQDLTLLKALVRQQLPEKYKEIFFDQSKNGYAGYIDGGASQEEFYKFIKPILEKMDGTEELLVKLNREDLLRKQRTFDNGSIPHQIHLGELHAILRRQEDFYPFLKDNREKIEKILTFRIPYYVGPLARGNSRFAWMTRKSEETITPWNFEEVVDKGASAQSFIERMTNFDKNLPNEKVLPKHSLLYEYFTVYNELTKVKYVTEGMRKPAFLSGEQKKAIVDLLFKTNRKVTVKQLKEDYFKKIECFDSVEISGVEDRFNASLGTYHDLLKIIKDKDFLDNEENEDILEDIVLTLTLFEDREMIEERLKTYAHLFDDKVMKQLKRRRYTGWGRLSRKLINGIRDKQSGKTILDFLKSDGFANRNFMQLIHDDSLTFKEDIQKAQVSGQGDSLHEHIANLAGSPAIKKGILQTVKVVDELVKVMGRHKPENIVIEMARENQTTQKGQKNSRERMKRIEEGIKELGSQILKEHPVENTQLQNEKLYLYYLQNGRDMYVDQELDINRLSDYDVDHIVPQSFLKDDSIDNKVLTRSDKNRGKSDNVPSEEVVKKMKNYWRQLLNAKLITQRKFDNLTKAERGGLSELDKAGFIKRQLVETRQITKHVAQILDSRMNTKYDENDKLIREVKVITLKSKLVSDFRKDFQFYKVREINNYHHAHDAYLNAVVGTALIKKYPKLESEFVYGDYKVYDVRKMIAKSEQEIGKATAKYFFYSNIMNFFKTEITLANGEIRKRPLIETNGETGEIVWDKGRDFATVRKVLSMPQVNIVKKTEVQTGGFSKESILPKRNSDKLIARKKDWDPKKYGGFVSPTVAYSVLVVAKVEKGKSKKLKSVKELLGITIMERSSFEKNPIDFLEAKGYKEVKKDLIIKLPKYSLFELENGRKRMLASARELQKGNELALPSKYVNFLYLASHYEKLKGSPEDNEQKQLFVEQHKHYLDEIIEQISEFSKRVILADANLDKVLSAYNKHRDKPIREQAENIIHLFTLTNLGAPAAFKYFDTTIDRKQYRSTKEVLDATLIHQSITGLYETRIDLSQLGGDEGADKRTADGSEFESPKKKRKV

SEQ ID NO: 345 - protein, 1588 aa, synthetic construct
  REGION 1..1588: note = 05. monoABE8.1_bpNLS + V82S polypeptide sequence
MSEVEFSHEYWMRHALTLAKRARDEREVPVGAVLVLNNRVIGEGWNRAIGLHDPTAHAEIMALRQGGLVMQNYRLIDATLYSTFEPCVMCAGAMIHSRIGRVVFGVRNAKTGAAGSLMDVLHYPGMNHRVEITEGILADECAALLCYFFRMPRQVFNAQKKAQSSTDSGGSSGGSSGSETPGTSESATPESSGGSSGGSDKKYSIGLAIGTNSVGWAVITDEYKVPSKKFKVLGNTDRHSIKKNLIGALLFDSGETAEATRLKRTARRRYTRRKNRICYLQEIFSNEMAKVDDSFFHRLEESFLVEEDKKHERHPIFGNIVDEVAYHEKYPTIYHLRKKLVDSTDKADLRLIYLALAHMIKFRGHFLIEGDLNPDNSDVDKLFIQLVQTYNQLFEENPINASGVDAKAILSARLSKSRRLENLIAQLPGEKKNGLFGNLIALSLGLTPNFKSNFDLAEDAKLQLSKDTYDDDLDNLLAQIGDQYADLFLAAKNLSDAILLSDILRVNTEITKAPLSASMIKRYDEHHQDLTLLKALVRQQLPEKYKEIFFDQSKNGYAGYIDGGASQEEFYKFIKPILEKMDGTEELLVKLNREDLLRKQRTFDNGSIPHQIHLGELHAILRRQEDFYPFLKDNREKIEKILTFRIPYYVGPLARGNSRFAWMTRKSEETITPWNFEEVVDKGASAQSFIERMTNFDKNLPNEKVLPKHSLLYEYFTVYNELTKVKYVTEGMRKPAFLSGEQKKAIVDLLFKTNRKVTVKQLKEDYFKKIECFDSVEISGVEDRFNASLGTYHDLLKIIKDKDFLDNEENEDILEDIVLTLTLFEDREMIEERLKTYAHLFDDKVMKQLKRRRYTGWGRLSRKLINGIRDKQSGKTILDFLKSDGFANRNFMQLIHDDSLTFKEDIQKAQVSGQGDSLHEHIANLAGSPAIKKGILQTVKVVDELVKVMGRHKPENIVIEMARENQTTQKGQKNSRERMKRIEEGIKELGSQILKEHPVENTQLQNEKLYLYYLQNGRDMYVDQELDINRLSDYDVDHIVPQSFLKDDSIDNKVLTRSDKNRGKSDNVPSEEVVKKMKNYWRQLLNAKLITQRKFDNLTKAERGGLSELDKAGFIKRQLVETRQITKHVAQILDSRMNTKYDENDKLIREVKVITLKSKLVSDFRKDFQFYKVREINNYHHAHDAYLNAVVGTALIKKYPKLESEFVYGDYKVYDVRKMIAKSEQEIGKATAKYFFYSNIMNFFKTEITLANGEIRKRPLIETNGETGEIVWDKGRDFATVRKVLSMPQVNIVKKTEVQTGGFSKESILPKRNSDKLIARKKDWDPKKYGGFVSPTVAYSVLVVAKVEKGKSKKLKSVKELLGITIMERSSFEKNPIDFLEAKGYKEVKKDLIIKLPKYSLFELENGRKRMLASARELQKGNELALPSKYVNFLYLASHYEKLKGSPEDNEQKQLFVEQHKHYLDEIIEQISEFSKRVILADANLDKVLSAYNKHRDKPIREQAENIIHLFTLTNLGAPAAFKYFDTTIDRKQYRSTKEVLDATLIHQSITGLYETRIDLSQLGGDEGADKRTADGSEFESPKKKRKV

SEQ ID NO: 346 - protein, 1588 aa, synthetic construct
  REGION 1..1588: note = 06. monoABE8.1_bpNLS + T166R polypeptide sequence
MSEVEFSHEYWMRHALTLAKRARDEREVPVGAVLVLNNRVIGEGWNRAIGLHDPTAHAEIMALRQGGLVMQNYRLIDATLYVTFEPCVMCAGAMIHSRIGRVVFGVRNAKTGAAGSLMDVLHYPGMNHRVEITEGILADECAALLCYFFRMPRQVFNAQKKAQSSRDSGGSSGGSSGSETPGTSESATPESSGGSSGGSDKKYSIGLAIGTNSVGWAVITDEYKVPSKKFKVLGNTDRHSIKKNLIGALLFDSGETAEATRLKRTARRRYTRRKNRICYLQEIFSNEMAKVDDSFFHRLEESFLVEEDKKHERHPIFGNIVDEVAYHEKYPTIYHLRKKLVDSTDKADLRLIYLALAHMIKFRGHFLIEGDLNPDNSDVDKLFIQLVQTYNQLFEENPINASGVDAKAILSARLSKSRRLENLIAQLPGEKKNGLFGNLIALSLGLTPNFKSNFDLAEDAKLQLSKDTYDDDLDNLLAQIGDQYADLFLAAKNLSDAILLSDILRVNTEITKAPLSASMIKRYDEHHQDLTLLKALVRQQLPEKYKEIFFDQSKNGYAGYIDGGASQEEFYKFIKPILEKMDGTEELLVKLNREDLLRKQRTFDNGSIPHQIHLGELHAILRRQEDFYPFLKDNREKIEKILTFRIPYYVGPLARGNSRFAWMTRKSEETITPWNFEEVVDKGASAQSFIERMTNFDKNLPNEKVLPKHSLLYEYFTVYNELTKVKYVTEGMRKPAFLSGEQKKAIVDLLFKTNRKVTVKQLKEDYFKKIECFDSVEISGVEDRFNASLGTYHDLLKIIKDKDFLDNEENEDILEDIVLTLTLFEDREMIEERLKTYAHLFDDKVMKQLKRRRYTGWGRLSRKLINGIRDKQSGKTILDFLKSDGFANRNFMQLIHDDSLTFKEDIQKAQVSGQGDSLHEHIANLAGSPAIKKGILQTVKVVDELVKVMGRHKPENIVIEMARENQTTQKGQKNSRERMKRIEEGIKELGSQILKEHPVENTQLQNEKLYLYYLQNGRDMYVDQELDINRLSDYDVDHIVPQSFLKDDSIDNKVLTRSDKNRGKSDNVPSEEVVKKMKNYWRQLLNAKLITQRKFDNLTKAERGGLSELDKAGFIKRQLVETRQITKHVAQILDSRMNTKYDENDKLIREVKVITLKSKLVSDFRKDFQFYKVREINNYHHAHDAYLNAVVGTALIKKYPKLESEFVYGDYKVYDVRKMIAKSEQEIGKATAKYFFYSNIMNFFKTEITLANGEIRKRPLIETNGETGEIVWDKGRDFATVRKVLSMPQVNIVKKTEVQTGGFSKESILPKRNSDKLIARKKDWDPKKYGGFVSPTVAYSVLVVAKVEKGKSKKLKSVKELLGITIMERSSFEKNPIDFLEAKGYKEVKKDLIIKLPKYSLFELENGRKRMLASARELQKGNELALPSKYVNFLYLASHYEKLKGSPEDNEQKQLFVEQHKHYLDEIIEQISEFSKRVILADANLDKVLSAYNKHRDKPIREQAENIIHLFTLTNLGAPAAFKYFDTTIDRKQYRSTKEVLDATLIHQSITGLYETRIDLSQLGGDEGADKRTADGSEFESPKKKRKV

SEQ ID NO: 347 - protein, 1588 aa, synthetic construct
  REGION 1..1588: note = 07. monoABE8.1_bpNLS + Q154R polypeptide sequence
MSEVEFSHEYWMRHALTLAKRARDEREVPVGAVLVLNNRVIGEGWNRAIGLHDPTAHAEIMALRQGGLVMQNYRLIDATLYVTFEPCVMCAGAMIHSRIGRVVFGVRNAKTGAAGSLMDVLHYPGMNHRVEITEGILADECAALLCYFFRMPRRVFNAQKKAQSSTDSGGSSGGSSGSETPGTSESATPESSGGSSGGSDKKYSIGLAIGTNSVGWAVITDEYKVPSKKFKVLGNTDRHSIKKNLIGALLFDSGETAEATRLKRTARRRYTRRKNRICYLQEIFSNEMAKVDDSFFHRLEESFLVEEDKKHERHPIFGNIVDEVAYHEKYPTIYHLRKKLVDSTDKADLRLIYLALAHMIKFRGHFLIEGDLNPDNSDVDKLFIQLVQTYNQLFEENPINASGVDAKAILSARLSKSRRLENLIAQLPGEKKNGLFGNLIALSLGLTPNFKSNFDLAEDAKLQLSKDTYDDDLDNLLAQIGDQYADLFLAAKNLSDAILLSDILRVNTEITKAPLSASMIKRYDEHHQDLTLLKALVRQQLPEKYKEIFFDQSKNGYAGYIDGGASQEEFYKFIKPILEKMDGTEELLVKLNREDLLRKQRTFDNGSIPHQIHLGELHAILRRQEDFYPFLKDNREKIEKILTFRIPYYVGPLARGNSRFAWMTRKSEETITPWNFEEVVDKGASAQSFIERMTNFDKNLPNEKVLPKHSLLYEYFTVYNELTKVKYVTEGMRKPAFLSGEQKKAIVDLLFKTNRKVTVKQLKEDYFKKIECFDSVEISGVEDRFNASLGTYHDLLKIIKDKDFLDNEENEDILEDIVLTLTLFEDREMIEERLKTYAHLFDDKVMKQLKRRRYTGWGRLSRKLINGIRDKQSGKTILDFLKSDGFANRNFMQLIHDDSLTFKEDIQKAQVSGQGDSLHEHIANLAGSPAIKKGILQTVKVVDELVKVMGRHKPENIVIEMARENQTTQKGQKNSRERMKRIEEGIKELGSQILKEHPVENTQLQNEKLYLYYLQNGRDMYVDQELDINRLSDYDVDHIVPQSFLKDDSIDNKVLTRSDKNRGKSDNVPSEEVVKKMKNYWRQLLNAKLITQRKFDNLTKAERGGLSELDKAGFIKRQLVETRQITKHVAQILDSRMNTKYDENDKLIREVKVITLKSKLVSDFRKDFQFYKVREINNYHHAHDAYLNAVVGTALIKKYPKLESEFVYGDYKVYDVRKMIAKSEQEIGKATAKYFFYSNIMNFFKTEITLANGEIRKRPLIETNGETGEIVWDKGRDFATVRKVLSMPQVNIVKKTEVQTGGFSKESILPKRNSDKLIARKKDWDPKKYGGFVSPTVAYSVLVVAKVEKGKSKKLKSVKELLGITIMERSSFEKNPIDFLEAKGYKEVKKDLIIKLPKYSLFELENGRKRMLASARELQKGNELALPSKYVNFLYLASHYEKLKGSPEDNEQKQLFVEQHKHYLDEIIEQISEFSKRVILADANLDKVLSAYNKHRDKPIREQAENIIHLFTLTNLGAPAAFKYFDTTIDRKQYRSTKEVLDATLIHQSITGLYETRIDLSQLGGDEGADKRTADGSEFESPKKKRKV

SEQ ID NO: 348 - protein, 1588 aa, synthetic construct
  REGION 1..1588: note = 08. monoABE8.1_bpNLS +Y147R_Q154R_Y123H polypeptide sequence
MSEVEFSHEYWMRHALTLAKRARDEREVPVGAVLVLNNRVIGEGWNRAIGLHDPTAHAEIMALRQGGLVMQNYRLIDATLYVTFEPCVMCAGAMIHSRIGRVVFGVRNAKTGAAGSLMDVLHHPGMNHRVEITEGILADECAALLCRFFRMPRRVFNAQKKAQSSTDSGGSSGGSSGSETPGTSESATPESSGGSSGGSDKKYSIGLAIGTNSVGWAVITDEYKVPSKKFKVLGNTDRHSIKKNLIGALLFDSGETAEATRLKRTARRRYTRRKNRICYLQEIFSNEMAKVDDSFFHRLEESFLVEEDKKHERHPIFGNIVDEVAYHEKYPTIYHLRKKLVDSTDKADLRLIYLALAHMIKFRGHFLIEGDLNPDNSDVDKLFIQLVQTYNQLFEENPINASGVDAKAILSARLSKSRRLENLIAQLPGEKKNGLFGNLIALSLGLTPNFKSNFDLAEDAKLQLSKDTYDDDLDNLLAQIGDQYADLFLAAKNLSDAILLSDILRVNTEITKAPLSASMIKRYDEHHQDLTLLKALVRQQLPEKYKEIFFDQSKNGYAGYIDGGASQEEFYKFIKPILEKMDGTEELLVKLNREDLLRKQRTFDNGSIPHQIHLGELHAILRRQEDFYPFLKDNREKIEKILTFRIPYYVGPLARGNSRFAWMTRKSEETITPWNFEEVVDKGASAQSFIERMTNFDKNLPNEKVLPKHSLLYEYFTVYNELTKVKYVTEGMRKPAFLSGEQKKAIVDLLFKTNRKVTVKQLKEDYFKKIECFDSVEISGVEDRFNASLGTYHDLLKIIKDKDFLDNEENEDILEDIVLTLTLFEDREMIEERLKTYAHLFDDKVMKQLKRRRYTGWGRLSRKLINGIRDKQSGKTILDFLKSDGFANRNFMQLIHDDSLTFKEDIQKAQVSGQGDSLHEHIANLAGSPAIKKGILQTVKVVDELVKVMGRHKPENIVIEMARENQTTQKGQKNSRERMKRIEEGIKELGSQILKEHPVENTQLQNEKLYLYYLQNGRDMYVDQELDINRLSDYDVDHIVPQSFLKDDSIDNKVLTRSDKNRGKSDNVPSEEVVKKMKNYWRQLLNAKLITQRKFDNLTKAERGGLSELDKAGFIKRQLVETRQITKHVAQILDSRMNTKYDENDKLIREVKVITLKSKLVSDFRKDFQFYKVREINNYHHAHDAYLNAVVGTALIKKYPKLESEFVYGDYKVYDVRKMIAKSEQEIGKATAKYFFYSNIMNFFKTEITLANGEIRKRPLIETNGETGEIVWDKGRDFATVRKVLSMPQVNIVKKTEVQTGGFSKESILPKRNSDKLIARKKDWDPKKYGGFVSPTVAYSVLVVAKVEKGKSKKLKSVKELLGITIMERSSFEKNPIDFLEAKGYKEVKKDLIIKLPKYSLFELENGRKRMLASARELQKGNELALPSKYVNFLYLASHYEKLKGSPEDNEQKQLFVEQHKHYLDEIIEQISEFSKRVILADANLDKVLSAYNKHRDKPIREQAENIIHLFTLTNLGAPAAFKYFDTTIDRKQYRSTKEVLDATLIHQSITGLYETRIDLSQLGGDEGADKRTADGSEFESPKKKRKV

SEQ ID NO: 349 - protein, 1588 aa, synthetic construct
  REGION 1..1588: note = 09. monoABE8.1_bpNLS +Y147R_Q154R_I76Y polypeptide sequence
MSEVEFSHEYWMRHALTLAKRARDEREVPVGAVLVLNNRVIGEGWNRAIGLHDPTAHAEIMALRQGGLVMQNYRLYDATLYVTFEPCVMCAGAMIHSRIGRVVFGVRNAKTGAAGSLMDVLHYPGMNHRVEITEGILADECAALLCRFFRMPRRVFNAQKKAQSSTDSGGSSGGSSGSETPGTSESATPESSGGSSGGSDKKYSIGLAIGTNSVGWAVITDEYKVPSKKFKVLGNTDRHSIKKNLIGALLFDSGETAEATRLKRTARRRYTRRKNRICYLQEIFSNEMAKVDDSFFHRLEESFLVEEDKKHERHPIFGNIVDEVAYHEKYPTIYHLRKKLVDSTDKADLRLIYLALAHMIKFRGHFLIEGDLNPDNSDVDKLFIQLVQTYNQLFEENPINASGVDAKAILSARLSKSRRLENLIAQLPGEKKNGLFGNLIALSLGLTPNFKSNFDLAEDAKLQLSKDTYDDDLDNLLAQIGDQYADLFLAAKNLSDAILLSDILRVNTEITKAPLSASMIKRYDEHHQDLTLLKALVRQQLPEKYKEIFFDQSKNGYAGYIDGGASQEEFYKFIKPILEKMDGTEELLVKLNREDLLRKQRTFDNGSIPHQIHLGELHAILRRQEDFYPFLKDNREKIEKILTFRIPYYVGPLARGNSRFAWMTRKSEETITPWNFEEVVDKGASAQSFIERMTNFDKNLPNEKVLPKHSLLYEYFTVYNELTKVKYVTEGMRKPAFLSGEQKKAIVDLLFKTNRKVTVKQLKEDYFKKIECFDSVEISGVEDRFNASLGTYHDLLKIIKDKDFLDNEENEDILEDIVLTLTLFEDREMIEERLKTYAHLFDDKVMKQLKRRRYTGWGRLSRKLINGIRDKQSGKTILDFLKSDGFANRNFMQLIHDDSLTFKEDIQKAQVSGQGDSLHEHIANLAGSPAIKKGILQTVKVVDELVKVMGRHKPENIVIEMARENQTTQKGQKNSRERMKRIEEGIKELGSQILKEHPVENTQLQNEKLYLYYLQNGRDMYVDQELDINRLSDYDVDHIVPQSFLKDDSIDNKVLTRSDKNRGKSDNVPSEEVVKKMKNYWRQLLNAKLITQRKFDNLTKAERGGLSELDKAGFIKRQLVETRQITKHVAQILDSRMNTKYDENDKLIREVKVITLKSKLVSDFRKDFQFYKVREINNYHHAHDAYLNAVVGTALIKKYPKLESEFVYGDYKVYDVRKMIAKSEQEIGKATAKYFFYSNIMNFFKTEITLANGEIRKRPLIETNGETGEIVWDKGRDFATVRKVLSMPQVNIVKKTEVQTGGFSKESILPKRNSDKLIARKKDWDPKKYGGFVSPTVAYSVLVVAKVEKGKSKKLKSVKELLGITIMERSSFEKNPIDFLEAKGYKEVKKDLIIKLPKYSLFELENGRKRMLASARELQKGNELALPSKYVNFLYLASHYEKLKGSPEDNEQKQLFVEQHKHYLDEIIEQISEFSKRVILADANLDKVLSAYNKHRDKPIREQAENIIHLFTLTNLGAPAAFKYFDTTIDRKQYRSTKEVLDATLIHQSITGLYETRIDLSQLGGDEGADKRTADGSEFESPKKKRKV

SEQ ID NO: 350 - protein, 1588 aa, synthetic construct
  REGION 1..1588: note = 10. monoABE8.1_bpNLS +Y147R_Q154R_T166R polypeptide sequence
MSEVEFSHEYWMRHALTLAKRARDEREVPVGAVLVLNNRVIGEGWNRAIGLHDPTAHAEIMALRQGGLVMQNYRLIDATLYVTFEPCVMCAGAMIHSRIGRVVFGVRNAKTGAAGSLMDVLHYPGMNHRVEITEGILADECAALLCRFFRMPRRVFNAQKKAQSSRDSGGSSGGSSGSETPGTSESATPESSGGSSGGSDKKYSIGLAIGTNSVGWAVITDEYKVPSKKFKVLGNTDRHSIKKNLIGALLFDSGETAEATRLKRTARRRYTRRKNRICYLQEIFSNEMAKVDDSFFHRLEESFLVEEDKKHERHPIFGNIVDEVAYHEKYPTIYHLRKKLVDSTDKADLRLIYLALAHMIKFRGHFLIEGDLNPDNSDVDKLFIQLVQTYNQLFEENPINASGVDAKAILSARLSKSRRLENLIAQLPGEKKNGLFGNLIALSLGLTPNFKSNFDLAEDAKLQLSKDTYDDDLDNLLAQIGDQYADLFLAAKNLSDAILLSDILRVNTEITKAPLSASMIKRYDEHHQDLTLLKALVRQQLPEKYKEIFFDQSKNGYAGYIDGGASQEEFYKFIKPILEKMDGTEELLVKLNREDLLRKQRTFDNGSIPHQIHLGELHAILRRQEDFYPFLKDNREKIEKILTFRIPYYVGPLARGNSRFAWMTRKSEETITPWNFEEVVDKGASAQSFIERMTNFDKNLPNEKVLPKHSLLYEYFTVYNELTKVKYVTEGMRKPAFLSGEQKKAIVDLLFKTNRKVTVKQLKEDYFKKIECFDSVEISGVEDRFNASLGTYHDLLKIIKDKDFLDNEENEDILEDIVLTLTLFEDREMIEERLKTYAHLFDDKVMKQLKRRRYTGWGRLSRKLINGIRDKQSGKTILDFLKSDGFANRNFMQLIHDDSLTFKEDIQKAQVSGQGDSLHEHIANLAGSPAIKKGILQTVKVVDELVKVMGRHKPENIVIEMARENQTTQKGQKNSRERMKRIEEGIKELGSQILKEHPVENTQLQNEKLYLYYLQNGRDMYVDQELDINRLSDYDVDHIVPQSFLKDDSIDNKVLTRSDKNRGKSDNVPSEEVVKKMKNYWRQLLNAKLITQRKFDNLTKAERGGLSELDKAGFIKRQLVETRQITKHVAQILDSRMNTKYDENDKLIREVKVITLKSKLVSDFRKDFQFYKVREINNYHHAHDAYLNAVVGTALIKKYPKLESEFVYGDYKVYDVRKMIAKSEQEIGKATAKYFFYSNIMNFFKTEITLANGEIRKRPLIETNGETGEIVWDKGRDFATVRKVLSMPQVNIVKKTEVQTGGFSKESILPKRNSDKLIARKKDWDPKKYGGFVSPTVAYSVLVVAKVEKGKSKKLKSVKELLGITIMERSSFEKNPIDFLEAKGYKEVKKDLIIKLPKYSLFELENGRKRMLASARELQKGNELALPSKYVNFLYLASHYEKLKGSPEDNEQKQLFVEQHKHYLDEIIEQISEFSKRVILADANLDKVLSAYNKHRDKPIREQAENIIHLFTLTNLGAPAAFKYFDTTIDRKQYRSTKEVLDATLIHQSITGLYETRIDLSQLGGDEGADKRTADGSEFESPKKKRKV

SEQ ID NO: 351 - protein, 1588 aa, synthetic construct
  REGION 1..1588: note = 11. monoABE8.1_bpNLS +Y147T_Q154R polypeptide sequence
MSEVEFSHEYWMRHALTLAKRARDEREVPVGAVLVLNNRVIGEGWNRAIGLHDPTAHAEIMALRQGGLVMQNYRLIDATLYVTFEPCVMCAGAMIHSRIGRVVFGVRNAKTGAAGSLMDVLHYPGMNHRVEITEGILADECAALLCTFFRMPRRVFNAQKKAQSSTDSGGSSGGSSGSETPGTSESATPESSGGSSGGSDKKYSIGLAIGTNSVGWAVITDEYKVPSKKFKVLGNTDRHSIKKNLIGALLFDSGETAEATRLKRTARRRYTRRKNRICYLQEIFSNEMAKVDDSFFHRLEESFLVEEDKKHERHPIFGNIVDEVAYHEKYPTIYHLRKKLVDSTDKADLRLIYLALAHMIKFRGHFLIEGDLNPDNSDVDKLFIQLVQTYNQLFEENPINASGVDAKAILSARLSKSRRLENLIAQLPGEKKNGLFGNLIALSLGLTPNFKSNFDLAEDAKLQLSKDTYDDDLDNLLAQIGDQYADLFLAAKNLSDAILLSDILRVNTEITKAPLSASMIKRYDEHHQDLTLLKALVRQQLPEKYKEIFFDQSKNGYAGYIDGGASQEEFYKFIKPILEKMDGTEELLVKLNREDLLRKQRTFDNGSIPHQIHLGELHAILRRQEDFYPFLKDNREKIEKILTFRIPYYVGPLARGNSRFAWMTRKSEETITPWNFEEVVDKGASAQSFIERMTNFDKNLPNEKVLPKHSLLYEYFTVYNELTKVKYVTEGMRKPAFLSGEQKKAIVDLLFKTNRKVTVKQLKEDYFKKIECFDSVEISGVEDRFNASLGTYHDLLKIIKDKDFLDNEENEDILEDIVLTLTLFEDREMIEERLKTYAHLFDDKVMKQLKRRRYTGWGRLSRKLINGIRDKQSGKTILDFLKSDGFANRNFMQLIHDDSLTFKEDIQKAQVSGQGDSLHEHIANLAGSPAIKKGILQTVKVVDELVKVMGRHKPENIVIEMARENQTTQKGQKNSRERMKRIEEGIKELGSQILKEHPVENTQLQNEKLYLYYLQNGRDMYVDQELDINRLSDYDVDHIVPQSFLKDDSIDNKVLTRSDKNRGKSDNVPSEEVVKKMKNYWRQLLNAKLITQRKFDNLTKAERGGLSELDKAGFIKRQLVETRQITKHVAQILDSRMNTKYDENDKLIREVKVITLKSKLVSDFRKDFQFYKVREINNYHHAHDAYLNAVVGTALIKKYPKLESEFVYGDYKVYDVRKMIAKSEQEIGKATAKYFFYSNIMNFFKTEITLANGEIRKRPLIETNGETGEIVWDKGRDFATVRKVLSMPQVNIVKKTEVQTGGFSKESILPKRNSDKLIARKKDWDPKKYGGFVSPTVAYSVLVVAKVEKGKSKKLKSVKELLGITIMERSSFEKNPIDFLEAKGYKEVKKDLIIKLPKYSLFELENGRKRMLASARELQKGNELALPSKYVNFLYLASHYEKLKGSPEDNEQKQLFVEQHKHYLDEIIEQISEFSKRVILADANLDKVLSAYNKHRDKPIREQAENIIHLFTLTNLGAPAAFKYFDTTIDRKQYRSTKEVLDATLIHQSITGLYETRIDLSQLGGDEGADKRTADGSEFESPKKKRKV

SEQ ID NO: 352 - protein, 1588 aa, synthetic construct
  REGION 1..1588: note = 12. monoABE8.1_bpNLS +Y147T_Q154S polypeptide sequence
MSEVEFSHEYWMRHALTLAKRARDEREVPVGAVLVLNNRVIGEGWNRAIGLHDPTAHAEIMALRQGGLVMQNYRLIDATLYVTFEPCVMCAGAMIHSRIGRVVFGVRNAKTGAAGSLMDVLHYPGMNHRVEITEGILADECAALLCTFFRMPRSVFNAQKKAQSSTDSGGSSGGSSGSETPGTSESATPESSGGSSGGSDKKYSIGLAIGTNSVGWAVITDEYKVPSKKFKVLGNTDRHSIKKNLIGALLFDSGETAEATRLKRTARRRYTRRKNRICYLQEIFSNEMAKVDDSFFHRLEESFLVEEDKKHERHPIFGNIVDEVAYHEKYPTIYHLRKKLVDSTDKADLRLIYLALAHMIKFRGHFLIEGDLNPDNSDVDKLFIQLVQTYNQLFEENPINASGVDAKAILSARLSKSRRLENLIAQLPGEKKNGLFGNLIALSLGLTPNFKSNFDLAEDAKLQLSKDTYDDDLDNLLAQIGDQYADLFLAAKNLSDAILLSDILRVNTEITKAPLSASMIKRYDEHHQDLTLLKALVRQQLPEKYKEIFFDQSKNGYAGYIDGGASQEEFYKFIKPILEKMDGTEELLVKLNREDLLRKQRTFDNGSIPHQIHLGELHAILRRQEDFYPFLKDNREKIEKILTFRIPYYVGPLARGNSRFAWMTRKSEETITPWNFEEVVDKGASAQSFIERMTNFDKNLPNEKVLPKHSLLYEYFTVYNELTKVKYVTEGMRKPAFLSGEQKKAIVDLLFKTNRKVTVKQLKEDYFKKIECFDSVEISGVEDRFNASLGTYHDLLKIIKDKDFLDNEENEDILEDIVLTLTLFEDREMIEERLKTYAHLFDDKVMKQLKRRRYTGWGRLSRKLINGIRDKQSGKTILDFLKSDGFANRNFMQLIHDDSLTFKEDIQKAQVSGQGDSLHEHIANLAGSPAIKKGILQTVKVVDELVKVMGRHKPENIVIEMARENQTTQKGQKNSRERMKRIEEGIKELGSQILKEHPVENTQLQNEKLYLYYLQNGRDMYVDQELDINRLSDYDVDHIVPQSFLKDDSIDNKVLTRSDKNRGKSDNVPSEEVVKKMKNYWRQLLNAKLITQRKFDNLTKAERGGLSELDKAGFIKRQLVETRQITKHVAQILDSRMNTKYDENDKLIREVKVITLKSKLVSDFRKDFQFYKVREINNYHHAHDAYLNAVVGTALIKKYPKLESEFVYGDYKVYDVRKMIAKSEQEIGKATAKYFFYSNIMNFFKTEITLANGEIRKRPLIETNGETGEIVWDKGRDFATVRKVLSMPQVNIVKKTEVQTGGFSKESILPKRNSDKLIARKKDWDPKKYGGFVSPTVAYSVLVVAKVEKGKSKKLKSVKELLGITIMERSSFEKNPIDFLEAKGYKEVKKDLIIKLPKYSLFELENGRKRMLASARELQKGNELALPSKYVNFLYLASHYEKLKGSPEDNEQKQLFVEQHKHYLDEIIEQISEFSKRVILADANLDKVLSAYNKHRDKPIREQAENIIHLFTLTNLGAPAAFKYFDTTIDRKQYRSTKEVLDATLIHQSITGLYETRIDLSQLGGDEGADKRTADGSEFESPKKKRKV

SEQ ID NO: 353 - protein, 1588 aa, synthetic construct
  REGION 1..1588: note = 13. monoABE8.1_bpNLS +H123Y123H_Y147R_Q154R_I76Y polypeptide sequence
MSEVEFSHEYWMRHALTLAKRARDEREVPVGAVLVLNNRVIGEGWNRAIGLHDPTAHAEIMALRQGGLVMQNYRLYDATLYVTFEPCVMCAGAMIHSRIGRVVFGVRNAKTGAAGSLMDVLHHPGMNHRVEITEGILADECAALLCRFFRMPRRVFNAQKKAQSSTDSGGSSGGSSGSETPGTSESATPESSGGSSGGSDKKYSIGLAIGTNSVGWAVITDEYKVPSKKFKVLGNTDRHSIKKNLIGALLFDSGETAEATRLKRTARRRYTRRKNRICYLQEIFSNEMAKVDDSFFHRLEESFLVEEDKKHERHPIFGNIVDEVAYHEKYPTIYHLRKKLVDSTDKADLRLIYLALAHMIKFRGHFLIEGDLNPDNSDVDKLFIQLVQTYNQLFEENPINASGVDAKAILSARLSKSRRLENLIAQLPGEKKNGLFGNLIALSLGLTPNFKSNFDLAEDAKLQLSKDTYDDDLDNLLAQIGDQYADLFLAAKNLSDAILLSDILRVNTEITKAPLSASMIKRYDEHHQDLTLLKALVRQQLPEKYKEIFFDQSKNGYAGYIDGGASQEEFYKFIKPILEKMDGTEELLVKLNREDLLRKQRTFDNGSIPHQIHLGELHAILRRQEDFYPFLKDNREKIEKILTFRIPYYVGPLARGNSRFAWMTRKSEETITPWNFEEVVDKGASAQSFIERMTNFDKNLPNEKVLPKHSLLYEYFTVYNELTKVKYVTEGMRKPAFLSGEQKKAIVDLLFKTNRKVTVKQLKEDYFKKIECFDSVEISGVEDRFNASLGTYHDLLKIIKDKDFLDNEENEDILEDIVLTLTLFEDREMIEERLKTYAHLFDDKVMKQLKRRRYTGWGRLSRKLINGIRDKQSGKTILDFLKSDGFANRNFMQLIHDDSLTFKEDIQKAQVSGQGDSLHEHIANLAGSPAIKKGILQTVKVVDELVKVMGRHKPENIVIEMARENQTTQKGQKNSRERMKRIEEGIKELGSQILKEHPVENTQLQNEKLYLYYLQNGRDMYVDQELDINRLSDYDVDHIVPQSFLKDDSIDNKVLTRSDKNRGKSDNVPSEEVVKKMKNYWRQLLNAKLITQRKFDNLTKAERGGLSELDKAGFIKRQLVETRQITKHVAQILDSRMNTKYDENDKLIREVKVITLKSKLVSDFRKDFQFYKVREINNYHHAHDAYLNAVVGTALIKKYPKLESEFVYGDYKVYDVRKMIAKSEQEIGKATAKYFFYSNIMNFFKTEITLANGEIRKRPLIETNGETGEIVWDKGRDFATVRKVLSMPQVNIVKKTEVQTGGFSKESILPKRNSDKLIARKKDWDPKKYGGFVSPTVAYSVLVVAKVEKGKSKKLKSVKELLGITIMERSSFEKNPIDFLEAKGYKEVKKDLIIKLPKYSLFELENGRKRMLASARELQKGNELALPSKYVNFLYLASHYEKLKGSPEDNEQKQLFVEQHKHYLDEIIEQISEFSKRVILADANLDKVLSAYNKHRDKPIREQAENIIHLFTLTNLGAPAAFKYFDTTIDRKQYRSTKEVLDATLIHQSITGLYETRIDLSQLGGDEGADKRTADGSEFESPKKKRKV

SEQ ID NO: 354 - protein, 1588 aa, synthetic construct
  REGION 1..1588: note = 14. monoABE8.1_bpNLS + V82S +Q154R polypeptide sequence
MSEVEFSHEYWMRHALTLAKRARDEREVPVGAVLVLNNRVIGEGWNRAIGLHDPTAHAEIMALRQGGLVMQNYRLIDATLYSTFEPCVMCAGAMIHSRIGRVVFGVRNAKTGAAGSLMDVLHYPGMNHRVEITEGILADECAALLCYFFRMPRRVFNAQKKAQSSTDSGGSSGGSSGSETPGTSESATPESSGGSSGGSDKKYSIGLAIGTNSVGWAVITDEYKVPSKKFKVLGNTDRHSIKKNLIGALLFDSGETAEATRLKRTARRRYTRRKNRICYLQEIFSNEMAKVDDSFFHRLEESFLVEEDKKHERHPIFGNIVDEVAYHEKYPTIYHLRKKLVDSTDKADLRLIYLALAHMIKFRGHFLIEGDLNPDNSDVDKLFIQLVQTYNQLFEENPINASGVDAKAILSARLSKSRRLENLIAQLPGEKKNGLFGNLIALSLGLTPNFKSNFDLAEDAKLQLSKDTYDDDLDNLLAQIGDQYADLFLAAKNLSDAILLSDILRVNTEITKAPLSASMIKRYDEHHQDLTLLKALVRQQLPEKYKEIFFDQSKNGYAGYIDGGASQEEFYKFIKPILEKMDGTEELLVKLNREDLLRKQRTFDNGSIPHQIHLGELHAILRRQEDFYPFLKDNREKIEKILTFRIPYYVGPLARGNSRFAWMTRKSEETITPWNFEEVVDKGASAQSFIERMTNFDKNLPNEKVLPKHSLLYEYFTVYNELTKVKYVTEGMRKPAFLSGEQKKAIVDLLFKTNRKVTVKQLKEDYFKKIECFDSVEISGVEDRFNASLGTYHDLLKIIKDKDFLDNEENEDILEDIVLTLTLFEDREMIEERLKTYAHLFDDKVMKQLKRRRYTGWGRLSRKLINGIRDKQSGKTILDFLKSDGFANRNFMQLIHDDSLTFKEDIQKAQVSGQGDSLHEHIANLAGSPAIKKGILQTVKVVDELVKVMGRHKPENIVIEMARENQTTQKGQKNSRERMKRIEEGIKELGSQILKEHPVENTQLQNEKLYLYYLQNGRDMYVDQELDINRLSDYDVDHIVPQSFLKDDSIDNKVLTRSDKNRGKSDNVPSEEVVKKMKNYWRQLLNAKLITQRKFDNLTKAERGGLSELDKAGFIKRQLVETRQITKHVAQILDSRMNTKYDENDKLIREVKVITLKSKLVSDFRKDFQFYKVREINNYHHAHDAYLNAVVGTALIKKYPKLESEFVYGDYKVYDVRKMIAKSEQEIGKATAKYFFYSNIMNFFKTEITLANGEIRKRPLIETNGETGEIVWDKGRDFATVRKVLSMPQVNIVKKTEVQTGGFSKESILPKRNSDKLIARKKDWDPKKYGGFVSPTVAYSVLVVAKVEKGKSKKLKSVKELLGITIMERSSFEKNPIDFLEAKGYKEVKKDLIIKLPKYSLFELENGRKRMLASARELQKGNELALPSKYVNFLYLASHYEKLKGSPEDNEQKQLFVEQHKHYLDEIIEQISEFSKRVILADANLDKVLSAYNKHRDKPIREQAENIIHLFTLTNLGAPAAFKYFDTTIDRKQYRSTKEVLDATLIHQSITGLYETRIDLSQLGGDEGADKRTADGSEFESPKKKRKV

SEQ ID NO: 355 - protein, 4 aa, synthetic construct
  REGION 1..4: note = synthetic peptide sequence
SGGS

SEQ ID NO: 356 - protein, 24 aa, synthetic construct
  REGION 1..24: note = synthetic peptide sequence
SGGSSGSETPGTSESATPESSGGS

SEQ ID NO: 357 - protein, 32 aa, synthetic construct
  REGION 1..32: note = synthetic polypeptide sequence
SGGSSGGSSGSETPGTSESATPESSGGSSGGS

SEQ ID NO: 358 - protein, 104 aa, synthetic construct
  REGION 1..104: note = synthetic polypeptide sequence
GGSGGSPGSPAGSPTSTEEGTSESATPESGPGTSTEPSEGSAPGSPAGSPTSTEEGTSTEPSEGSAPGTSTEPSEGSAPGTSESATPESGPGSEPATSGGSGGS

SEQ ID NO: 359 - protein, 24 aa, synthetic construct
  REGION 1..24: note = synthetic peptide sequence
SGGSSGGSSGSETPGTSESATPES

SEQ ID NO: 360 - protein, 40 aa, synthetic construct
  REGION 1..40: note = synthetic polypeptide sequence
SGGSSGGSSGSETPGTSESATPESSGGSSGGSSGGSSGGS

SEQ ID NO: 361 - protein, 64 aa, synthetic construct
  REGION 1..64: note = synthetic polypeptide sequence
SGGSSGGSSGSETPGTSESATPESSGGSSGGSSGGSSGGSSGSETPGTSESATPESSGGSSGGS

SEQ ID NO: 362 - protein, 92 aa, synthetic construct
  REGION 1..92: note = synthetic polypeptide sequence
PGSPAGSPTSTEEGTSESATPESGPGTSTEPSEGSAPGSPAGSPTSTEEGTSTEPSEGSAPGTSTEPSEGSAPGTSESATPESGPGSEPATS

SEQ ID NO: 363 - protein, 5 aa, synthetic construct
  REGION 1..5: note = synthetic peptide sequence
PAPAP

SEQ ID NO: 364 - protein, 6 aa, synthetic construct
  REGION 1..6: note = synthetic peptide sequence
PAPAPA

SEQ ID NO: 365 - protein, 7 aa, synthetic construct
  REGION 1..7: note = synthetic peptide sequence
PAPAPAP

SEQ ID NO: 366 - protein, 8 aa, synthetic construct
  REGION 1..8: note = synthetic peptide sequence
PAPAPAPA

SEQ ID NO: 367 - protein, 9 aa, synthetic construct
  REGION 1..9: note = synthetic peptide sequence
PAPAPAPAP

SEQ ID NO: 368 - protein, 15 aa, synthetic construct
  REGION 1..15: note = synthetic peptide sequence
PAPAPAPAPAPAPAP

SEQ ID NO: 369 - protein, 21 aa, synthetic construct
  REGION 1..21: note = synthetic peptide sequence
PAPAPAPAPAPAPAPAPAPAP

SEQ ID NO: 370 - DNA, 306 bp, synthetic construct
  misc_feature 1..306: note = DnaE Intein-N polynucleotide sequence
  source 1..306: mol_type = other DNA
tgcctgtcatacgaaaccgagatactgacagtagaatatggccttctgccaatcgggaagattgtggagaaacggatagaatgcacagtttactctgtcgataacaatggtaacatttatactcagccagttgcccagtggcacgaccggggagagcaggaagtattcgaatactgtctggaggatggaagtctcattagggccactaaggaccacaaatttatgacagtcgatggccagatgctgcctatagacgaaatctttgagcgagagttggacctcatgcgagttgacaaccttcctaat

SEQ ID NO: 371 - protein, 102 aa, synthetic construct
  REGION 1..102: note = DnaE Intein-N polypeptide sequence
CLSYETEILTVEYGLLPIGKIVEKRIECTVYSVDNNGNIYTQPVAQWHDRGEQEVFEYCLEDGSLIRATKDHKFMTVDGQMLPIDEIFERELDLMRVDNLPN

SEQ ID NO: 372 - DNA, 108 bp, synthetic construct
  misc_feature 1..108: note = DnaE Intein-C polynucleotide sequence
  source 1..108: mol_type = other DNA
atgatcaagatagctacaaggaagtatcttggcaaacaaaacgtttatgatattggagtcgaaagagatcacaactttgctctgaagaacggattcatagcttctaat

SEQ ID NO: 373 - protein, 36 aa, synthetic construct
  REGION 1..36: note = DnaE Intein-C polypeptide sequence
MIKIATRKYLGKQNVYDIGVERDHNFALKNGFIASN

SEQ ID NO: 374 - DNA, 303 bp, synthetic construct
  misc_feature 1..303: note = Cfa-N polynucleotide sequence
  source 1..303: mol_type = other DNA
tgcctgtcttatgataccgagatacttaccgttgaatatggcttcttgcctattggaaagattgtcgaagagagaattgaatgcacagtatatactgtagacaagaatggtttcgtttacacacagcccattgctcaatggcacaatcgcggcgaacaagaagtatttgagtactgtctcgaggatggaagcatcatacgagcaactaaagatcataaattcatgaccactgacgggcagatgttgccaatagatgagatattcgagcggggcttggatctcaaacaagtggatggattgcca

SEQ ID NO: 375 - protein, 101 aa, synthetic construct
  REGION 1..101: note = Cfa-N polypeptide sequence
CLSYDTEILTVEYGFLPIGKIVEERIECTVYTVDKNGFVYTQPIAQWHNRGEQEVFEYCLEDGSIIRATKDHKFMTTDGQMLPIDEIFERGLDLKQVDGLP

SEQ ID NO: 376 - DNA, 159 bp, synthetic construct
  misc_feature 1..159: note = Cfa-C polynucleotide sequence
  source 1..159: mol_type = other DNA
atgaagaggactgccgatggatcagagtttgaatctcccaagaagaagaggaaagtaaagataatatctcgaaaaagtcttggtacccaaaatgtctatgatattggagtggagaaagatcacaacttccttctcaagaacggtctcgtagccagcaac

SEQ ID NO: 377 - protein, 53 aa, synthetic construct
  REGION 1..53: note = Cfa-C polypeptide sequence
MKRTADGSEFESPKKKRKVKIISRKSLGTQNVYDIGVEKDHNFLLKNGLVASN

SEQ ID NO: 378 - protein, 1081 aa, Neisseria meningitidis
  REGION 1..1081: note = MISC_FEATURE - Nme3Cas9; WP_002217928.1 type II CRISPR RNA-guided endonuclease Cas9 [Neisseria meningitidis]
  REGION 1..1081: note = MISC_FEATURE - NCBI Reference: WP_002217928.1; type II CRISPR RNA-guided endonuclease Cas9; Nme3Cas9 polypeptide sequence
MAAFKPNPINYILGLDIGIASVGWAMVEIDEEENPIRLIDLGVRVFERAEVPKTGDSLAMARRLARSVRRLTRRRAHRLLRARRLLKREGVLQAADFDENGLIKSLPNTPWQLRAAALDRKLTPLEWSAVLLHLIKHRGYLSQRKNEGETADKELGALLKGVADNAHALQTGDFRTPAELALNKFEKECGHIRNQRGDYSHTFSRKDLQAELNLLFEKQKEFGNPHVSGGLKEGIETLLMTQRPALSGDAVQKMLGHCTFEPAEPKAAKNTYTAERFIWLTKLNNLRILEQGSERPLTDTERATLMDEPYRKSKLTYAQARKLLSLEDTAFFKGLRYGKDNAEASTLMEMKAYHTISRALEKEGLKDKKSPLNLSPELQDEIGTAFSLFKTDEDITGRLKDRIQPEILEALLKHISFDKFVQISLKALRRIVPLMEQGKRYDEACAEIYGDHYGKKNTEEKIYLPPIPADEIRNPVVLRALSQARKVINGVVRRYGSPARIHIETAREVGKSFKDRKEIEKRQEENRKDREKAAAKFREYFPNFVGEPKSKDILKLRLYEQQHGKCLYSGKEINLGRLNEKGYVEIDHALPFSRTWDDSFNNKVLVLGSENQNKGNQTPYEYFNGKDNSREWQEFKARVETSRFPRSKKQRILLQKFDEDGFKERNLNDTRYVNRFLCQFVADRMRLTGKGKKRVFASNGQITNLLRGFWGLRKVRAENDRHHALDAVVVACSTVAMQQKITRFVRYKEMNAFDGKTIDKETGEVLHQKTHFPQPWEFFAQEVMIRVFGKPDGKPEFEEADTPEKLRTLLAEKLSSRPEAVHEYVTPLFVSRAPNRKMSGQGHMETVKSAKRLDEGVSVLRVPLTQLKLKDLEKMVNREREPKLYEALKARLEAHKDDPAKAFAEPFYKYDKAGNRTQQVKAVRVEQVQKTGVWVRNHNGIADNATMVRVDVFEKGDKYYLVPIYSWQVAKGILPDRAVVAYADEEDWTVIDESFRFKFVLYSNDLIKVQLKKDSFLGYFSGLDRATGAISLREHDLEKSKGKDGMHRIGVKTALSFQKYQIDEMGKEIRPCRLKKRPPVR

SEQ ID NO: 379 - RNA, 66 nt, synthetic construct
  misc_feature 1..66: note = Telomerase Ku Binding Motif oligonucleotide sequence
  source 1..66: mol_type = other RNA
ttcttgtcgtacttatagatcgctacgttatttcaattttgaaaatctgagtcctgggagtgcgga

SEQ ID NO: 380 - protein, 1094 aa, synthetic construct
  REGION 1..1094: note = Telomerase Ku Heterodimer polypeptide sequence
MSGWESYYKTEGDEEAEEEQEENLEASGDYKYSGRDSLIFLVDASKAMFESQSEDELTPFDMSIQCIQSVYISKIISSDRDLLAVVFYGTEKDKNSVNFKNIYVLQELDNPGAKRILELDQFKGQQGQKRFQDMMGHGSDYSLSEVLWVCANLFSDVQFKMSHKRIMLFTNEDNPHGNDSAKASRARTKAGDLRDTGIFLDLMHLKKPGGFDISLFYRDIISIAEDEDLRVHFEESSKLEDLLRKVRAKETRKRALSRLKLKLNKDIVISVGIYNLVQKALKPPPIKLYRETNEPVKTKTRTFNTSTGGLLLPSDTKRSQIYGSRQIILEKEETEELKRFDDPGLMLMGFKPLVLLKKHHYLRPSLFVYPEESLVIGSSTLFSALLIKCLEKEVAALCRYTPRRNIPPYFVALVPQEEELDDQKIQVTPPGFQLVFLPFADDKRKMPFTEKIMATPEQVGKMKAIVEKLRFTYRSDSFENPVLQQHFRNLEALALDLMEPEQAVDLTLPKVEAMNKRLGSLVDEFKELVYPPDYNPEGKVTKRKHDNEGSGSKRPKVEYSEEELKTHISKGTLGKFTVPMLKEACRAYGLKSGLKKQELLEALTKHFQDMVRSGNKAAVVLCMDVGFTMSNSIPGIESPFEQAKKVITMFVQRQVFAENKDEIALVLFGTDGTDNPLSGGDQYQNITVHRHLMLPDFDLLEDIESKIQPGSQQADFLDALIVSMDVIQHETIGKKFEKRHIEIFTDLSSRFSKSQLDIIIHSLKKCDISERHSIHWPCRLTIGSNLSIRIAAYKSILQERVKKTWTVVDAKTLKKEDIQKETVYCLNDDDETEVLKEDIIQGFRYGSDIVPFSKVDEEQMKYKSEGKCFSVLGFCKSSQVQRRFFMGNQVLKVFAARDDEAAAVALSSLIHALDDLDMVAIVRYAYDKRANPQVGVAFPHIKHNYECLVYVQLPFMEDLRQYMFSSLKNSKKYAPTEAQLNAVDALIDSMSLAKKDEKTDTLEDLFPTTKIPNPRFQRLFQCLLHRALHPREPLPPIQQHIWNMLNPPAEVTTKSQIPLSKIKTLFPLIEAKKKDQVTAQEIFQDNHEDGPTAK

SEQ ID NO: 381 - RNA, 10 nt, synthetic construct
  misc_feature 1..10: note = Telomerase Sm7 consensus site(single stranded) oligonucleotide sequence
  source 1..10: mol_type = other RNA
aatttttgga

SEQ ID NO: 382 - protein, 83 aa, synthetic construct
  REGION 1..83: note = MS2 coat protein polypeptide sequence
GSVIDVSSQRVNVQRPLDALGNSLNSPVIIKLKGDREFRGVLKSFDLHMNLVLNDAEELEDGEVTRRLGTVLIRGDNIVYISP

SEQ ID NO: 383 - RNA, 26 nt, synthetic construct
  misc_feature 1..26: note = PP7 phage operator stem loop oligonucleotide sequence
  source 1..26: mol_type = other RNA
ataaggagtttatatggaaaccctta

SEQ ID NO: 384 - protein, 128 aa, synthetic construct
  REGION 1..128: note = PP7 coat protein (PCP)polypeptide sequence
MSKTIVLSVGEATRTLTEIQSTADRQIFEEKVGPLVGRLRLTASLRQNGAKTAYRVNLKLDQADVVDCSTSVCGELPKVRYTQVWSHDVTIVANSTEASRKSLYDLTKSLVATSQVEDLVVNLVPLGR

SEQ ID NO: 385 - RNA, 19 nt, synthetic construct
  misc_feature 1..19: note = SfMu Com stem loop oligonucleotide sequence
  source 1..19: mol_type = other RNA
ctgaatgcctgcgagcatc

SEQ ID NO: 386 - protein, 62 aa, synthetic construct
  REGION 1..62: note = SfMu Com binding protein polypeptide sequence
MKSIRCKNCNKLLFKADSFDHIEIRCPRCKRHIIMLNACEHPTEKHCGKREKITHSDETVRY

SEQ ID NO: 387 - protein, 47 aa, synthetic construct
  REGION 1..47: note = leucine zipper polypeptide sequence
LEIRAAFLRQRNTALRTEVAELEQEVQRLENEVSQYETRYGPLGGGK

SEQ ID NO: 388 - protein, 47 aa, synthetic construct
  REGION 1..47: note = leucine zipper polypeptide sequence
LEIEAAFLERENTALETRVAELRQRVQRLRNRVSQYRTRYGPLGGGK

SEQ ID NO: 389 - RNA, 100 nt, synthetic construct
  source 1..100: mol_type = other RNA
gctctcaccgggcgccagctgttttagagctagaaatagcaagttaaaataaggctagtccgttatcaacttgaaaaagtggcaccgagtcggtgctttt

SEQ ID NO: 390 - RNA, 100 nt, synthetic construct
  source 1..100: mol_type = other RNA
ctcaccgggcgccagcttgggttttagagctagaaatagcaagttaaaataaggctagtccgttatcaacttgaaaaagtggcaccgagtcggtgctttt

SEQ ID NO: 391 - RNA, 100 nt, synthetic construct
  source 1..100: mol_type = other RNA
ccctttcctaggcaaggagagttttagagctagaaatagcaagttaaaataaggctagtccgttatcaacttgaaaaagtggcaccgagtcggtgctttt

SEQ ID NO: 392 - RNA, 100 nt, synthetic construct
  source 1..100: mol_type = other RNA
gcctaggaaagggggaagcagttttagagctagaaatagcaagttaaaataaggctagtccgttatcaacttgaaaaagtggcaccgagtcggtgctttt

SEQ ID NO: 393 - RNA, 100 nt, synthetic construct
  source 1..100: mol_type = other RNA
cctggagtcgcagtaccagggttttagagctagaaatagcaagttaaaataaggctagtccgttatcaacttgaaaaagtggcaccgagtcggtgctttt

SEQ ID NO: 394 - RNA, 100 nt, synthetic construct
  source 1..100: mol_type = other RNA
gtaccaggtgggcccgctacgttttagagctagaaatagcaagttaaaataaggctagtccgttatcaacttgaaaaagtggcaccgagtcggtgctttt

SEQ ID NO: 395 - RNA, 100 nt, synthetic construct
  source 1..100: mol_type = other RNA
cccactcaccggcaagttgtgttttagagctagaaatagcaagttaaaataaggctagtccgttatcaacttgaaaaagtggcaccgagtcggtgctttt

SEQ ID NO: 396 - RNA, 100 nt, synthetic construct
  source 1..100: mol_type = other RNA
ccaggtggccatcaaacacggttttagagctagaaatagcaagttaaaataaggctagtccgttatcaacttgaaaaagtggcaccgagtcggtgctttt

SEQ ID NO: 397 - RNA, 100 nt, synthetic construct
  source 1..100: mol_type = other RNA
tgatggccacctggaagcccgttttagagctagaaatagcaagttaaaataaggctagtccgttatcaacttgaaaaagtggcaccgagtcggtgctttt

SEQ ID NO: 398 - RNA, 100 nt, synthetic construct
  source 1..100: mol_type = other RNA
atggccacctggaagcccaggttttagagctagaaatagcaagttaaaataaggctagtccgttatcaacttgaaaaagtggcaccgagtcggtgctttt

SEQ ID NO: 399 - RNA, 100 nt, synthetic construct
  source 1..100: mol_type = other RNA
actcaccagctctccccagtgttttagagctagaaatagcaagttaaaataaggctagtccgttatcaacttgaaaaagtggcaccgagtcggtgctttt

SEQ ID NO: 400 - RNA, 100 nt, synthetic construct
  source 1..100: mol_type = other RNA
cattaggctgcaggggcgaggttttagagctagaaatagcaagttaaaataaggctagtccgttatcaacttgaaaaagtggcaccgagtcggtgctttt

SEQ ID NO: 401 - RNA, 100 nt, synthetic construct
  source 1..100: mol_type = other RNA
attaggctgcaggggcgagggttttagagctagaaatagcaagttaaaataaggctagtccgttatcaacttgaaaaagtggcaccgagtcggtgctttt

SEQ ID NO: 402 - RNA, 100 nt, synthetic construct
  source 1..100: mol_type = other RNA
ggcaggtgctggaggccgtggttttagagctagaaatagcaagttaaaataaggctagtccgttatcaacttgaaaaagtggcaccgagtcggtgctttt

SEQ ID NO: 403 - RNA, 100 nt, synthetic construct
  source 1..100: mol_type = other RNA
accatcgaagtccgtgtagagttttagagctagaaatagcaagttaaaataaggctagtccgttatcaacttgaaaaagtggcaccgagtcggtgctttt

SEQ ID NO: 404 - RNA, 100 nt, synthetic construct
  source 1..100: mol_type = other RNA
ctcgggtccctgtgagccaagttttagagctagaaatagcaagttaaaataaggctagtccgttatcaacttgaaaaagtggcaccgagtcggtgctttt

SEQ ID NO: 405 - RNA, 100 nt, synthetic construct
  source 1..100: mol_type = other RNA
gccaggttttcttcaggcaggttttagagctagaaatagcaagttaaaataaggctagtccgttatcaacttgaaaaagtggcaccgagtcggtgctttt

SEQ ID NO: 406 - RNA, 100 nt, synthetic construct
  source 1..100: mol_type = other RNA
gctgacattctgcagaaagggttttagagctagaaatagcaagttaaaataaggctagtccgttatcaacttgaaaaagtggcaccgagtcggtgctttt

SEQ ID NO: 407 - RNA, 100 nt, synthetic construct
  source 1..100: mol_type = other RNA
aatgtcagcatctcattagagttttagagctagaaatagcaagttaaaataaggctagtccgttatcaacttgaaaaagtggcaccgagtcggtgctttt

SEQ ID NO: 408 - RNA, 100 nt, synthetic construct
  source 1..100: mol_type = other RNA
gcaagatgttctcctgccccgttttagagctagaaatagcaagttaaaataaggctagtccgttatcaacttgaaaaagtggcaccgagtcggtgctttt

SEQ ID NO: 409 - RNA, 100 nt, synthetic construct
  source 1..100: mol_type = other RNA
gcaaaccaaaaatcgcaagcgttttagagctagaaatagcaagttaaaataaggctagtccgttatcaacttgaaaaagtggcaccgagtcggtgctttt

SEQ ID NO: 410 - RNA, 100 nt, synthetic construct
  source 1..100: mol_type = other RNA
tagctacctgactccagtatgttttagagctagaaatagcaagttaaaataaggctagtccgttatcaacttgaaaaagtggcaccgagtcggtgctttt

SEQ ID NO: 411 - RNA, 100 nt, synthetic construct
  source 1..100: mol_type = other RNA
tcatcaaactggagaagggtgttttagagctagaaatagcaagttaaaataaggctagtccgttatcaacttgaaaaagtggcaccgagtcggtgctttt

SEQ ID NO: 412 - RNA, 100 nt, synthetic construct
  source 1..100: mol_type = other RNA
gtctcagctgcaggaacgtggttttagagctagaaatagcaagttaaaataaggctagtccgttatcaacttgaaaaagtggcaccgagtcggtgctttt

SEQ ID NO: 413 - RNA, 99 nt, synthetic construct
  source 1..99: mol_type = other RNA
gataaattgcaagaaaaaggttttagagctagaaatagcaagttaaaataaggctagtccgttatcaacttgaaaaagtggcaccgagtcggtgctttt

SEQ ID NO: 414 - RNA, 100 nt, synthetic construct
  source 1..100: mol_type = other RNA
cacctccactgtttagcttcgttttagagctagaaatagcaagttaaaataaggctagtccgttatcaacttgaaaaagtggcaccgagtcggtgctttt

SEQ ID NO: 415 - RNA, 100 nt, synthetic construct
  source 1..100: mol_type = other RNA
ttccccagataatctgataggttttagagctagaaatagcaagttaaaataaggctagtccgttatcaacttgaaaaagtggcaccgagtcggtgctttt

SEQ ID NO: 416 - RNA, 100 nt, synthetic construct
  source 1..100: mol_type = other RNA
cccagataatctgatagtgggttttagagctagaaatagcaagttaaaataaggctagtccgttatcaacttgaaaaagtggcaccgagtcggtgctttt

SEQ ID NO: 417 - RNA, 100 nt, synthetic construct
  source 1..100: mol_type = other RNA
tcctcgcacaggagaatatggttttagagctagaaatagcaagttaaaataaggctagtccgttatcaacttgaaaaagtggcaccgagtcggtgctttt

SEQ ID NO: 418 - RNA, 100 nt, synthetic construct
  source 1..100: mol_type = other RNA
gttaagtacctcctgagacagttttagagctagaaatagcaagttaaaataaggctagtccgttatcaacttgaaaaagtggcaccgagtcggtgctttt

SEQ ID NO: 419 - RNA, 100 nt, synthetic construct
  source 1..100: mol_type = other RNA
tctctgtaggtgaattccaagttttagagctagaaatagcaagttaaaataaggctagtccgttatcaacttgaaaaagtggcaccgagtcggtgctttt

SEQ ID NO: 420 - RNA, 100 nt, synthetic construct
  source 1..100: mol_type = other RNA
tcagaaccgtctctgtgagcgttttagagctagaaatagcaagttaaaataaggctagtccgttatcaacttgaaaaagtggcaccgagtcggtgctttt

SEQ ID NO: 421 - RNA, 100 nt, synthetic construct
  source 1..100: mol_type = other RNA
acttcggcaagactttgagggttttagagctagaaatagcaagttaaaataaggctagtccgttatcaacttgaaaaagtggcaccgagtcggtgctttt

SEQ ID NO: 422 - RNA, 100 nt, synthetic construct
  source 1..100: mol_type = other RNA
tacacaaaatgaaaagctgagttttagagctagaaatagcaagttaaaataaggctagtccgttatcaacttgaaaaagtggcaccgagtcggtgctttt

SEQ ID NO: 423 - RNA, 100 nt, synthetic construct
  source 1..100: mol_type = other RNA
gccctcctaaggtggaattggttttagagctagaaatagcaagttaaaataaggctagtccgttatcaacttgaaaaagtggcaccgagtcggtgctttt

SEQ ID NO: 424 - RNA, 100 nt, synthetic construct
  source 1..100: mol_type = other RNA
cctacagttgaaagcacactgttttagagctagaaatagcaagttaaaataaggctagtccgttatcaacttgaaaaagtggcaccgagtcggtgctttt

SEQ ID NO: 425 - RNA, 100 nt, synthetic construct
  source 1..100: mol_type = other RNA
gcaccaggttgagcttattggttttagagctagaaatagcaagttaaaataaggctagtccgttatcaacttgaaaaagtggcaccgagtcggtgctttt

SEQ ID NO: 426 - RNA, 99 nt, synthetic construct
  source 1..99: mol_type = other RNA
tacctcaataagctcaaccgttttagagctagaaatagcaagttaaaataaggctagtccgttatcaacttgaaaaagtggcaccgagtcggtgctttt

SEQ ID NO: 427 - RNA, 100 nt, synthetic construct
  source 1..100: mol_type = other RNA
atctcgctacacacagataagttttagagctagaaatagcaagttaaaataaggctagtccgttatcaacttgaaaaagtggcaccgagtcggtgctttt

SEQ ID NO: 428 - RNA, 100 nt, synthetic construct
  source 1..100: mol_type = other RNA
ggcgatgccggaggagggttgttttagagctagaaatagcaagttaaaataaggctagtccgttatcaacttgaaaaagtggcaccgagtcggtgctttt

SEQ ID NO: 429 - RNA, 100 nt, synthetic construct
  source 1..100: mol_type = other RNA
cggtgcggcgcaggccctatgttttagagctagaaatagcaagttaaaataaggctagtccgttatcaacttgaaaaagtggcaccgagtcggtgctttt

SEQ ID NO: 430 - RNA, 100 nt, synthetic construct
  source 1..100: mol_type = other RNA
tcggtgcggcgcaggccctagttttagagctagaaatagcaagttaaaataaggctagtccgttatcaacttgaaaaagtggcaccgagtcggtgctttt

SEQ ID NO: 431 - RNA, 100 nt, synthetic construct
  source 1..100: mol_type = other RNA
ctcaccccaagtgactcgaggttttagagctagaaatagcaagttaaaataaggctagtccgttatcaacttgaaaaagtggcaccgagtcggtgctttt

SEQ ID NO: 432 - RNA, 100 nt, synthetic construct
  source 1..100: mol_type = other RNA
tcctgggggcacagggttaggttttagagctagaaatagcaagttaaaataaggctagtccgttatcaacttgaaaaagtggcaccgagtcggtgctttt

SEQ ID NO: 433 - RNA, 100 nt, synthetic construct
  source 1..100: mol_type = other RNA
caggacctcagcaggaccccgttttagagctagaaatagcaagttaaaataaggctagtccgttatcaacttgaaaaagtggcaccgagtcggtgctttt

SEQ ID NO: 434 - RNA, 100 nt, synthetic construct
  source 1..100: mol_type = other RNA
ggtacacatccaggtgacgcgttttagagctagaaatagcaagttaaaataaggctagtccgttatcaacttgaaaaagtggcaccgagtcggtgctttt

SEQ ID NO: 435 - RNA, 100 nt, synthetic construct
  source 1..100: mol_type = other RNA
tttgcagataaccttctgttgttttagagctagaaatagcaagttaaaataaggctagtccgttatcaacttgaaaaagtggcaccgagtcggtgctttt

SEQ ID NO: 436 - RNA, 100 nt, synthetic construct
  source 1..100: mol_type = other RNA
gccatacctatccgtggcctgttttagagctagaaatagcaagttaaaataaggctagtccgttatcaacttgaaaaagtggcaccgagtcggtgctttt

SEQ ID NO: 437 - RNA, 100 nt, synthetic construct
  source 1..100: mol_type = other RNA
gacctacaataagggggaaagttttagagctagaaatagcaagttaaaataaggctagtccgttatcaacttgaaaaagtggcaccgagtcggtgctttt

SEQ ID NO: 438 - RNA, 100 nt, synthetic construct
  source 1..100: mol_type = other RNA
acagacacctaaaatgtgcagttttagagctagaaatagcaagttaaaataaggctagtccgttatcaacttgaaaaagtggcaccgagtcggtgctttt

SEQ ID NO: 439 - RNA, 100 nt, synthetic construct
  source 1..100: mol_type = other RNA
ttttaggtgtctgtttcatggttttagagctagaaatagcaagttaaaataaggctagtccgttatcaacttgaaaaagtggcaccgagtcggtgctttt

SEQ ID NO: 440 - RNA, 100 nt, synthetic construct
  source 1..100: mol_type = other RNA
tatttcctgtatcaagcaaagttttagagctagaaatagcaagttaaaataaggctagtccgttatcaacttgaaaaagtggcaccgagtcggtgctttt

SEQ ID NO: 441 - RNA, 100 nt, synthetic construct
  source 1..100: mol_type = other RNA
ttgatacaggaaatatatccgttttagagctagaaatagcaagttaaaataaggctagtccgttatcaacttgaaaaagtggcaccgagtcggtgctttt

SEQ ID NO: 442 - RNA, 100 nt, synthetic construct
  source 1..100: mol_type = other RNA
aacaggttgcgggaatccaagttttagagctagaaatagcaagttaaaataaggctagtccgttatcaacttgaaaaagtggcaccgagtcggtgctttt

SEQ ID NO: 443 - RNA, 100 nt, synthetic construct
  source 1..100: mol_type = other RNA
caaaggataattcagtgtcagttttagagctagaaatagcaagttaaaataaggctagtccgttatcaacttgaaaaagtggcaccgagtcggtgctttt

SEQ ID NO: 444 - RNA, 100 nt, synthetic construct
  source 1..100: mol_type = other RNA
acgaggagatatttttaatcgttttagagctagaaatagcaagttaaaataaggctagtccgttatcaacttgaaaaagtggcaccgagtcggtgctttt

SEQ ID NO: 445 - RNA, 100 nt, synthetic construct
  source 1..100: mol_type = other RNA
acctacatattttcagatttgttttagagctagaaatagcaagttaaaataaggctagtccgttatcaacttgaaaaagtggcaccgagtcggtgctttt

SEQ ID NO: 446 - RNA, 100 nt, synthetic construct
  source 1..100: mol_type = other RNA
ttacttggaattagtgctacgttttagagctagaaatagcaagttaaaataaggctagtccgttatcaacttgaaaaagtggcaccgagtcggtgctttt

SEQ ID NO: 447 - RNA, 100 nt, synthetic construct
  source 1..100: mol_type = other RNA
aattccaagtaagttggtgagttttagagctagaaatagcaagttaaaataaggctagtccgttatcaacttgaaaaagtggcaccgagtcggtgctttt

SEQ ID NO: 448 - RNA, 100 nt, synthetic construct
  source 1..100: mol_type = other RNA
cacaggaagtacaaacttctgttttagagctagaaatagcaagttaaaataaggctagtccgttatcaacttgaaaaagtggcaccgagtcggtgctttt

SEQ ID NO: 449 - RNA, 100 nt, synthetic construct
  source 1..100: mol_type = other RNA
tgctgaacagatggaaaatcgttttagagctagaaatagcaagttaaaataaggctagtccgttatcaacttgaaaaagtggcaccgagtcggtgctttt

SEQ ID NO: 450 - RNA, 100 nt, synthetic construct
  source 1..100: mol_type = other RNA
aattcagctagaagatacatgttttagagctagaaatagcaagttaaaataaggctagtccgttatcaacttgaaaaagtggcaccgagtcggtgctttt

SEQ ID NO: 451 - RNA, 119 nt, synthetic construct
  source 1..119: mol_type = other RNA
gttctgtcttttggtcaggacaaccgtctagctataagtgctgcagggtgtgagaaactcctattgctggacgatgtctcttacgaggcattagcactctacgcagcctgcccttggac

SEQ ID NO: 452 - RNA, 119 nt, synthetic construct
  source 1..119: mol_type = other RNA
gttctgtcttttggtcaggacaaccgtctagctataagtgctgcagggtgtgagaaactcctattgctggacgatgtctcttacgaggcattagcacgctgggacatgtcccgaggggc

SEQ ID NO: 453 - RNA, 119 nt, synthetic construct
  source 1..119: mol_type = other RNA
gttctgtcttttggtcaggacaaccgtctagctataagtgctgcagggtgtgagaaactcctattgctggacgatgtctcttacgaggcattagcactcttggccctgcaacatctgca

SEQ ID NO: 454 - RNA, 119 nt, synthetic construct
  source 1..119: mol_type = other RNA
gttctgtcttttggtcaggacaaccgtctagctataagtgctgcagggtgtgagaaactcctattgctggacgatgtctcttacgaggcattagcacccctcatagaggacacatccac

SEQ ID NO: 455 - RNA, 119 nt, synthetic construct
  source 1..119: mol_type = other RNA
gttctgtcttttggtcaggacaaccgtctagctataagtgctgcagggtgtgagaaactcctattgctggacgatgtctcttacgaggcattagcactctcattgatacctctcacctc

SEQ ID NO: 456 - RNA, 119 nt, synthetic construct
  source 1..119: mol_type = other RNA
gttctgtcttttggtcaggacaaccgtctagctataagtgctgcagggtgtgagaaactcctattgctggacgatgtctcttacgaggcattagcacatacctctcacctctgtggtga

SEQ ID NO: 457 - RNA, 119 nt, synthetic construct
  source 1..119: mol_type = other RNA
gttctgtcttttggtcaggacaaccgtctagctataagtgctgcagggtgtgagaaactcctattgctggacgatgtctcttacgaggcattagcaccttcccctcaccacagaggtga

SEQ ID NO: 458 - RNA, 119 nt, synthetic construct
  source 1..119: mol_type = other RNA
gttctgtcttttggtcaggacaaccgtctagctataagtgctgcagggtgtgagaaactcctattgctggacgatgtctcttacgaggcattagcactcagatgactcgtaaagggcaa

SEQ ID NO: 459 - RNA, 119 nt, synthetic construct
  source 1..119: mol_type = other RNA
gttctgtcttttggtcaggacaaccgtctagctataagtgctgcagggtgtgagaaactcctattgctggacgatgtctcttacgaggcattagcactgggtttttttctttgcccttt

SEQ ID NO: 460 - RNA, 119 nt, synthetic construct
  source 1..119: mol_type = other RNA
gttctgtcttttggtcaggacaaccgtctagctataagtgctgcagggtgtgagaaactcctattgctggacgatgtctcttacgaggcattagcactgaaattttgggtttttttctt

SEQ ID NO: 461 - RNA, 119 nt, synthetic construct
  source 1..119: mol_type = other RNA
gttctgtcttttggtcaggacaaccgtctagctataagtgctgcagggtgtgagaaactcctattgctggacgatgtctcttacgaggcattagcactgagacttaaacggaaattttg

SEQ ID NO: 462 - RNA, 119 nt, synthetic construct
  source 1..119: mol_type = other RNA
gttctgtcttttggtcaggacaaccgtctagctataagtgctgcagggtgtgagaaactcctattgctggacgatgtctcttacgaggcattagcaccaaaatttccgtttaagtctca

SEQ ID NO: 463 - RNA, 119 nt, synthetic construct
  source 1..119: mol_type = other RNA
gttctgtcttttggtcaggacaaccgtctagctataagtgctgcagggtgtgagaaactcctattgctggacgatgtctcttacgaggcattagcacccgtttaagtctcataatcaag

SEQ ID NO: 464 - RNA, 119 nt, synthetic construct
  source 1..119: mol_type = other RNA
gttctgtcttttggtcaggacaaccgtctagctataagtgctgcagggtgtgagaaactcctattgctggacgatgtctcttacgaggcattagcacccaattcctgacattttggcag

SEQ ID NO: 465 - RNA, 119 nt, synthetic construct
  source 1..119: mol_type = other RNA
gttctgtcttttggtcaggacaaccgtctagctataagtgctgcagggtgtgagaaactcctattgctggacgatgtctcttacgaggcattagcacgaaataaaagagcagctggaga

SEQ ID NO: 466 - RNA, 119 nt, synthetic construct
  source 1..119: mol_type = other RNA
gttctgtcttttggtcaggacaaccgtctagctataagtgctgcagggtgtgagaaactcctattgctggacgatgtctcttacgaggcattagcacagggaccacagtggaaacaatt

SEQ ID NO: 467 - RNA, 119 nt, synthetic construct
  source 1..119: mol_type = other RNA
gttctgtcttttggtcaggacaaccgtctagctataagtgctgcagggtgtgagaaactcctattgctggacgatgtctcttacgaggcattagcactttccactgtggtccctgaatc

SEQ ID NO: 468 - RNA, 119 nt, synthetic construct
  source 1..119: mol_type = other RNA
gttctgtcttttggtcaggacaaccgtctagctataagtgctgcagggtgtgagaaactcctattgctggacgatgtctcttacgaggcattagcacagctaggaggtgtctcttcaac

SEQ ID NO: 469 - RNA, 119 nt, synthetic construct
  source 1..119: mol_type = other RNA
gttctgtcttttggtcaggacaaccgtctagctataagtgctgcagggtgtgagaaactcctattgctggacgatgtctcttacgaggcattagcacgaacactgcaaaccaaaaatcg

SEQ ID NO: 470 - RNA, 119 nt, synthetic construct
  source 1..119: mol_type = other RNA
gttctgtcttttggtcaggacaaccgtctagctataagtgctgcagggtgtgagaaactcctattgctggacgatgtctcttacgaggcattagcacttggtttgcagtgttctaatgt

SEQ ID NO: 471 - RNA, 119 nt, synthetic construct
  source 1..119: mol_type = other RNA
gttctgtcttttggtcaggacaaccgtctagctataagtgctgcagggtgtgagaaactcctattgctggacgatgtctcttacgaggcattagcacctgccagcttgcgatttttggt

SEQ ID NO: 472 - RNA, 119 nt, synthetic construct
  source 1..119: mol_type = other RNA
gttctgtcttttggtcaggacaaccgtctagctataagtgctgcagggtgtgagaaactcctattgctggacgatgtctcttacgaggcattagcacaagatgaacttcgtgagcacat

SEQ ID NO: 473 - RNA, 119 nt, synthetic construct
  source 1..119: mol_type = other RNA
gttctgtcttttggtcaggacaaccgtctagctataagtgctgcagggtgtgagaaactcctattgctggacgatgtctcttacgaggcattagcacaaaaactggaacgacgacaggc

SEQ ID NO: 474 - RNA, 119 nt, synthetic construct
  source 1..119: mol_type = other RNA
gttctgtcttttggtcaggacaaccgtctagctataagtgctgcagggtgtgagaaactcctattgctggacgatgtctcttacgaggcattagcacattgtcaaccgatactggagtc

SEQ ID NO: 475 - RNA, 119 nt, synthetic construct
  source 1..119: mol_type = other RNA
gttctgtcttttggtcaggacaaccgtctagctataagtgctgcagggtgtgagaaactcctattgctggacgatgtctcttacgaggcattagcactcaaccgatactggagtcaggt

SEQ ID NO: 476 - RNA, 119 nt, synthetic construct
  source 1..119: mol_type = other RNA
gttctgtcttttggtcaggacaaccgtctagctataagtgctgcagggtgtgagaaactcctattgctggacgatgtctcttacgaggcattagcacctatcagagtctggttctggtt

SEQ ID NO: 477 - RNA, 119 nt, synthetic construct
  source 1..119: mol_type = other RNA
gttctgtcttttggtcaggacaaccgtctagctataagtgctgcagggtgtgagaaactcctattgctggacgatgtctcttacgaggcattagcacatcataaacagtcacaatctgg

SEQ ID NO: 478 - RNA, 119 nt, synthetic construct
  source 1..119: mol_type = other RNA
gttctgtcttttggtcaggacaaccgtctagctataagtgctgcagggtgtgagaaactcctattgctggacgatgtctcttacgaggcattagcactgactgtttatgataaattgca

SEQ ID NO: 479 - RNA, 119 nt, synthetic construct
  source 1..119: mol_type = other RNA
gttctgtcttttggtcaggacaaccgtctagctataagtgctgcagggtgtgagaaactcctattgctggacgatgtctcttacgaggcattagcaccaagaaaaagtggagctcttat

SEQ ID NO: 480 - RNA, 119 nt, synthetic construct
  source 1..119: mol_type = other RNA
gttctgtcttttggtcaggacaaccgtctagctataagtgctgcagggtgtgagaaactcctattgctggacgatgtctcttacgaggcattagcactcctgtgcgaggaaagagttca

SEQ ID NO: 481 - RNA, 119 nt, synthetic construct
  source 1..119: mol_type = other RNA
gttctgtcttttggtcaggacaaccgtctagctataagtgctgcagggtgtgagaaactcctattgctggacgatgtctcttacgaggcattagcacctgtagcctcatattctcctgt

SEQ ID NO: 482 - RNA, 119 nt, synthetic construct
  source 1..119: mol_type = other RNA
gttctgtcttttggtcaggacaaccgtctagctataagtgctgcagggtgtgagaaactcctattgctggacgatgtctcttacgaggcattagcacacagatcttcttcaggaaaagc

SEQ ID NO: 483 - RNA, 119 nt, synthetic construct
  source 1..119: mol_type = other RNA
gttctgtcttttggtcaggacaaccgtctagctataagtgctgcagggtgtgagaaactcctattgctggacgatgtctcttacgaggcattagcacggctgtctccactttactctgc

SEQ ID NO: 484 - RNA, 119 nt, synthetic construct
  source 1..119: mol_type = other RNA
gttctgtcttttggtcaggacaaccgtctagctataagtgctgcagggtgtgagaaactcctattgctggacgatgtctcttacgaggcattagcacatgacctgcagtgggatattga

SEQ ID NO: 485 - RNA, 119 nt, synthetic construct
  source 1..119: mol_type = other RNA
gttctgtcttttggtcaggacaaccgtctagctataagtgctgcagggtgtgagaaactcctattgctggacgatgtctcttacgaggcattagcactgtcaatatcccactgcaggtc

SEQ ID NO: 486 - RNA, 119 nt, synthetic construct
  source 1..119: mol_type = other RNA
gttctgtcttttggtcaggacaaccgtctagctataagtgctgcagggtgtgagaaactcctattgctggacgatgtctcttacgaggcattagcacacaaaattcgaaagagggaaca

SEQ ID NO: 487 - RNA, 119 nt, synthetic construct
  source 1..119: mol_type = other RNA
gttctgtcttttggtcaggacaaccgtctagctataagtgctgcagggtgtgagaaactcctattgctggacgatgtctcttacgaggcattagcacgaaagagggaacagcgactcaa

SEQ ID NO: 488 - RNA, 119 nt, synthetic construct
  source 1..119: mol_type = other RNA
gttctgtcttttggtcaggacaaccgtctagctataagtgctgcagggtgtgagaaactcctattgctggacgatgtctcttacgaggcattagcacttggtttgcagtgttcgaatgt

SEQ ID NO: 489 - RNA, 119 nt, synthetic construct
  source 1..119: mol_type = other RNA
gttctgtcttttggtcaggacaaccgtctagctataagtgctgcagggtgtgagaaactcctattgctggacgatgtctcttacgaggcattagcacatcatagacagtcacaatctgg

SEQ ID NO: 490 - RNA, 119 nt, synthetic construct
  source 1..119: mol_type = other RNA
gttctgtcttttggtcaggacaaccgtctagctataagtgctgcagggtgtgagaaactcctattgctggacgatgtctcttacgaggcattagcactgactgtctatgataaattgca

SEQ ID NO: 491 - RNA, 119 nt, synthetic construct
  source 1..119: mol_type = other RNA
gttctgtcttttggtcaggacaaccgtctagctataagtgctgcagggtgtgagaaactcctattgctggacgatgtctcttacgaggcattagcaccaagaaaaagtggaactcttat

SEQ ID NO: 492 - RNA, 100 nt, synthetic construct
  source 1..100: mol_type = other RNA
aagcatgtgctccagaggttgttttagagctagaaatagcaagttaaaataaggctagtccgttatcaacttgaaaaagtggcaccgagtcggtgctttt

SEQ ID NO: 493 - RNA, 100 nt, synthetic construct
  source 1..100: mol_type = other RNA
gaagcatgtgctccagaggtgttttagagctagaaatagcaagttaaaataaggctagtccgttatcaacttgaaaaagtggcaccgagtcggtgctttt

SEQ ID NO: 494 - RNA, 100 nt, synthetic construct
  source 1..100: mol_type = other RNA
ttcttacccagggtacaggggttttagagctagaaatagcaagttaaaataaggctagtccgttatcaacttgaaaaagtggcaccgagtcggtgctttt

SEQ ID NO: 495 - RNA, 100 nt, synthetic construct
  source 1..100: mol_type = other RNA
cgaccagaagattgtagaatgttttagagctagaaatagcaagttaaaataaggctagtccgttatcaacttgaaaaagtggcaccgagtcggtgctttt

SEQ ID NO: 496 - RNA, 100 nt, synthetic construct
  source 1..100: mol_type = other RNA
tcgaccagaagattgtagaagttttagagctagaaatagcaagttaaaataaggctagtccgttatcaacttgaaaaagtggcaccgagtcggtgctttt

SEQ ID NO: 497 - RNA, 100 nt, synthetic construct
  source 1..100: mol_type = other RNA
aatcccattctacaatcttcgttttagagctagaaatagcaagttaaaataaggctagtccgttatcaacttgaaaaagtggcaccgagtcggtgctttt

SEQ ID NO: 498 - RNA, 100 nt, synthetic construct
  source 1..100: mol_type = other RNA
tgcaatccattctactccaagttttagagctagaaatagcaagttaaaataaggctagtccgttatcaacttgaaaaagtggcaccgagtcggtgctttt

SEQ ID NO: 499 - RNA, 103 nt, synthetic construct
  source 1..103: mol_type = other RNA
cacctacctaagaaccatcctgggttttagagctagaaatagcaagttaaaataaggctagtccgttatcaacttgaaaaagtggcaccgagtcggtgctttt

SEQ ID NO: 500 - RNA, 100 nt, synthetic construct
  source 1..100: mol_type = other RNA
actcacgctggatagcctccgttttagagctagaaatagcaagttaaaataaggctagtccgttatcaacttgaaaaagtggcaccgagtcggtgctttt

SEQ ID NO: 501 - RNA, 100 nt, synthetic construct
  source 1..100: mol_type = other RNA
cgcgcaggagctcaaggagcgttttagagctagaaatagcaagttaaaataaggctagtccgttatcaacttgaaaaagtggcaccgagtcggtgctttt

SEQ ID NO: 502 - RNA, 100 nt, synthetic construct
  source 1..100: mol_type = other RNA
cgggtctagggaccaaggccgttttagagctagaaatagcaagttaaaataaggctagtccgttatcaacttgaaaaagtggcaccgagtcggtgctttt

SEQ ID NO: 503 - RNA, 100 nt, synthetic construct
  source 1..100: mol_type = other RNA
ccgggtctagggaccaaggcgttttagagctagaaatagcaagttaaaataaggctagtccgttatcaacttgaaaaagtggcaccgagtcggtgctttt

SEQ ID NO: 504 - RNA, 100 nt, synthetic construct
  source 1..100: mol_type = other RNA
gaagatgcagcagcacgagcgttttagagctagaaatagcaagttaaaataaggctagtccgttatcaacttgaaaaagtggcaccgagtcggtgctttt

SEQ ID NO: 505 - RNA, 100 nt, synthetic construct
  source 1..100: mol_type = other RNA
gcagcagcacgagcaggcccgttttagagctagaaatagcaagttaaaataaggctagtccgttatcaacttgaaaaagtggcaccgagtcggtgctttt

SEQ ID NO: 506 - RNA, 100 nt, synthetic construct
  source 1..100: mol_type = other RNA
ggggcagtgccagctggagagttttagagctagaaatagcaagttaaaataaggctagtccgttatcaacttgaaaaagtggcaccgagtcggtgctttt

SEQ ID NO: 507 - RNA, 98 nt, synthetic construct
  source 1..98: mol_type = other RNA
ggcagtgccagctggagagttttagagctagaaatagcaagttaaaataaggctagtccgttatcaacttgaaaaagtggcaccgagtcggtgctttt

SEQ ID NO: 508 - RNA, 100 nt, synthetic construct
  source 1..100: mol_type = other RNA
cagccaacctcgctgcagatgttttagagctagaaatagcaagttaaaataaggctagtccgttatcaacttgaaaaagtggcaccgagtcggtgctttt

SEQ ID NO: 509 - RNA, 100 nt, synthetic construct
  source 1..100: mol_type = other RNA
aggagcagcggctgaacttcgttttagagctagaaatagcaagttaaaataaggctagtccgttatcaacttgaaaaagtggcaccgagtcggtgctttt

SEQ ID NO: 510 - RNA, 100 nt, synthetic construct
  source 1..100: mol_type = other RNA
aaggagcagcggctgaacttgttttagagctagaaatagcaagttaaaataaggctagtccgttatcaacttgaaaaagtggcaccgagtcggtgctttt

SEQ ID NO: 511 - RNA, 100 nt, synthetic construct
  source 1..100: mol_type = other RNA
gtcccacctctcacgctccggttttagagctagaaatagcaagttaaaataaggctagtccgttatcaacttgaaaaagtggcaccgagtcggtgctttt

SEQ ID NO: 512 - RNA, 100 nt, synthetic construct
  source 1..100: mol_type = other RNA
ggcccagcaggcctgcattggttttagagctagaaatagcaagttaaaataaggctagtccgttatcaacttgaaaaagtggcaccgagtcggtgctttt

SEQ ID NO: 513 - RNA, 100 nt, synthetic construct
  source 1..100: mol_type = other RNA
cacgtgcttggcctcaatgcgttttagagctagaaatagcaagttaaaataaggctagtccgttatcaacttgaaaaagtggcaccgagtcggtgctttt

SEQ ID NO: 514 - RNA, 100 nt, synthetic construct
  source 1..100: mol_type = other RNA
tttctcaggtggatgagaaggttttagagctagaaatagcaagttaaaataaggctagtccgttatcaacttgaaaaagtggcaccgagtcggtgctttt

SEQ ID NO: 515 - RNA, 100 nt, synthetic construct
  source 1..100: mol_type = other RNA
acacgctgcagtgacaagaagttttagagctagaaatagcaagttaaaataaggctagtccgttatcaacttgaaaaagtggcaccgagtcggtgctttt

SEQ ID NO: 516 - RNA, 100 nt, synthetic construct
  source 1..100: mol_type = other RNA
cacacgctgcagtgacaagagttttagagctagaaatagcaagttaaaataaggctagtccgttatcaacttgaaaaagtggcaccgagtcggtgctttt

SEQ ID NO: 517 - RNA, 100 nt, synthetic construct
  source 1..100: mol_type = other RNA
gggccgaaagtacccggagggttttagagctagaaatagcaagttaaaataaggctagtccgttatcaacttgaaaaagtggcaccgagtcggtgctttt

SEQ ID NO: 518 - RNA, 100 nt, synthetic construct
  source 1..100: mol_type = other RNA
cacgatcgcgcggccgtagcgttttagagctagaaatagcaagttaaaataaggctagtccgttatcaacttgaaaaagtggcaccgagtcggtgctttt

SEQ ID NO: 519 - RNA, 100 nt, synthetic construct
  source 1..100: mol_type = other RNA
tccctagacccggaacccgcgttttagagctagaaatagcaagttaaaataaggctagtccgttatcaacttgaaaaagtggcaccgagtcggtgctttt

SEQ ID NO: 520 - RNA, 100 nt, synthetic construct
  source 1..100: mol_type = other RNA
ctagacccggaacccgctgggttttagagctagaaatagcaagttaaaataaggctagtccgttatcaacttgaaaaagtggcaccgagtcggtgctttt

SEQ ID NO: 521 - RNA, 100 nt, synthetic construct
  source 1..100: mol_type = other RNA
cccagcttacagcctggccagttttagagctagaaatagcaagttaaaataaggctagtccgttatcaacttgaaaaagtggcaccgagtcggtgctttt

SEQ ID NO: 522 - RNA, 100 nt, synthetic construct
  source 1..100: mol_type = other RNA
ctcttcacaggacaagtacagttttagagctagaaatagcaagttaaaataaggctagtccgttatcaacttgaaaaagtggcaccgagtcggtgctttt

SEQ ID NO: 523 - RNA, 99 nt, synthetic construct
  source 1..99: mol_type = other RNA
gcgcaggagctcaaggagcgttttagagctagaaatagcaagttaaaataaggctagtccgttatcaacttgaaaaagtggcaccgagtcggtgctttt

SEQ ID NO: 524 - RNA, 100 nt, synthetic construct
  source 1..100: mol_type = other RNA
gacagaccaacatgtctccagttttagagctagaaatagcaagttaaaataaggctagtccgttatcaacttgaaaaagtggcaccgagtcggtgctttt

SEQ ID NO: 525 - RNA, 100 nt, synthetic construct
  source 1..100: mol_type = other RNA
ttacctgtatattttatatcgttttagagctagaaatagcaagttaaaataaggctagtccgttatcaacttgaaaaagtggcaccgagtcggtgctttt

SEQ ID NO: 526 - RNA, 100 nt, synthetic construct
  source 1..100: mol_type = other RNA
tgcccagggagtttgcccgtgttttagagctagaaatagcaagttaaaataaggctagtccgttatcaacttgaaaaagtggcaccgagtcggtgctttt

SEQ ID NO: 527 - RNA, 100 nt, synthetic construct
  source 1..100: mol_type = other RNA
cttccaacgggcaaactcccgttttagagctagaaatagcaagttaaaataaggctagtccgttatcaacttgaaaaagtggcaccgagtcggtgctttt

SEQ ID NO: 528 - RNA, 100 nt, synthetic construct
  source 1..100: mol_type = other RNA
ttccaacgggcaaactccctgttttagagctagaaatagcaagttaaaataaggctagtccgttatcaacttgaaaaagtggcaccgagtcggtgctttt

SEQ ID NO: 529 - RNA, 100 nt, synthetic construct
  source 1..100: mol_type = other RNA
catgagatccagatatcaacgttttagagctagaaatagcaagttaaaataaggctagtccgttatcaacttgaaaaagtggcaccgagtcggtgctttt

SEQ ID NO: 530 - RNA, 100 nt, synthetic construct
  source 1..100: mol_type = other RNA
ccttcaaggtaggaagccaggttttagagctagaaatagcaagttaaaataaggctagtccgttatcaacttgaaaaagtggcaccgagtcggtgctttt

SEQ ID NO: 531 - RNA, 100 nt, synthetic construct
  source 1..100: mol_type = other RNA
actctctacctgaattctccgttttagagctagaaatagcaagttaaaataaggctagtccgttatcaacttgaaaaagtggcaccgagtcggtgctttt

SEQ ID NO: 532 - RNA, 100 nt, synthetic construct
  source 1..100: mol_type = other RNA
actcatctagtgagagacaagttttagagctagaaatagcaagttaaaataaggctagtccgttatcaacttgaaaaagtggcaccgagtcggtgctttt

SEQ ID NO: 533 - RNA, 100 nt, synthetic construct
  source 1..100: mol_type = other RNA
gctcctgcagagtgccacgggttttagagctagaaatagcaagttaaaataaggctagtccgttatcaacttgaaaaagtggcaccgagtcggtgctttt

SEQ ID NO: 534 - RNA, 100 nt, synthetic construct
  source 1..100: mol_type = other RNA
cttacctctctctaggcagcgttttagagctagaaatagcaagttaaaataaggctagtccgttatcaacttgaaaaagtggcaccgagtcggtgctttt

SEQ ID NO: 535 - RNA, 100 nt, synthetic construct
  source 1..100: mol_type = other RNA
accaccagctgcctagagaggttttagagctagaaatagcaagttaaaataaggctagtccgttatcaacttgaaaaagtggcaccgagtcggtgctttt

SEQ ID NO: 536 - RNA, 100 nt, synthetic construct
  source 1..100: mol_type = other RNA
ctcccaggacaattcagcaggttttagagctagaaatagcaagttaaaataaggctagtccgttatcaacttgaaaaagtggcaccgagtcggtgctttt

SEQ ID NO: 537 - RNA, 100 nt, synthetic construct
  source 1..100: mol_type = other RNA
tgaattgtcctgggagataagttttagagctagaaatagcaagttaaaataaggctagtccgttatcaacttgaaaaagtggcaccgagtcggtgctttt

SEQ ID NO: 538 - RNA, 100 nt, synthetic construct
  source 1..100: mol_type = other RNA
aagccactgctgaattgtccgttttagagctagaaatagcaagttaaaataaggctagtccgttatcaacttgaaaaagtggcaccgagtcggtgctttt

SEQ ID NO: 539 - RNA, 100 nt, synthetic construct
  source 1..100: mol_type = other RNA
tatcagaatttaaaacctatgttttagagctagaaatagcaagttaaaataaggctagtccgttatcaacttgaaaaagtggcaccgagtcggtgctttt

SEQ ID NO: 540 - RNA, 100 nt, synthetic construct
  source 1..100: mol_type = other RNA
caggagctcaaggaatagtagttttagagctagaaatagcaagttaaaataaggctagtccgttatcaacttgaaaaagtggcaccgagtcggtgctttt

SEQ ID NO: 541 - RNA, 100 nt, synthetic construct
  source 1..100: mol_type = other RNA
gaatcagactcatgccaagcgttttagagctagaaatagcaagttaaaataaggctagtccgttatcaacttgaaaaagtggcaccgagtcggtgctttt

SEQ ID NO: 542 - RNA, 100 nt, synthetic construct
  source 1..100: mol_type = other RNA
agaatcagactcatgccaaggttttagagctagaaatagcaagttaaaataaggctagtccgttatcaacttgaaaaagtggcaccgagtcggtgctttt

SEQ ID NO: 543 - RNA, 100 nt, synthetic construct
  source 1..100: mol_type = other RNA
cttctctatcagatgctgtggttttagagctagaaatagcaagttaaaataaggctagtccgttatcaacttgaaaaagtggcaccgagtcggtgctttt

SEQ ID NO: 544 - RNA, 100 nt, synthetic construct
  source 1..100: mol_type = other RNA
tatagtggatttatggtctggttttagagctagaaatagcaagttaaaataaggctagtccgttatcaacttgaaaaagtggcaccgagtcggtgctttt

SEQ ID NO: 545 - RNA, 100 nt, synthetic construct
  source 1..100: mol_type = other RNA
tacagtcccttcctggaaaggttttagagctagaaatagcaagttaaaataaggctagtccgttatcaacttgaaaaagtggcaccgagtcggtgctttt

SEQ ID NO: 546 - RNA, 100 nt, synthetic construct
  source 1..100: mol_type = other RNA
acaaggatacagtcccttccgttttagagctagaaatagcaagttaaaataaggctagtccgttatcaacttgaaaaagtggcaccgagtcggtgctttt

SEQ ID NO: 547 - RNA, 100 nt, synthetic construct
  source 1..100: mol_type = other RNA
tcagttgacatttggtcagtgttttagagctagaaatagcaagttaaaataaggctagtccgttatcaacttgaaaaagtggcaccgagtcggtgctttt

SEQ ID NO: 548 - RNA, 100 nt, synthetic construct
  source 1..100: mol_type = other RNA
ataaggatacgatctgtaccgttttagagctagaaatagcaagttaaaataaggctagtccgttatcaacttgaaaaagtggcaccgagtcggtgctttt

SEQ ID NO: 549 - RNA, 100 nt, synthetic construct
  source 1..100: mol_type = other RNA
tgatattagatattgatcaggttttagagctagaaatagcaagttaaaataaggctagtccgttatcaacttgaaaaagtggcaccgagtcggtgctttt

SEQ ID NO: 550 - RNA, 100 nt, synthetic construct
  source 1..100: mol_type = other RNA
agaaactgcaaccaacagtagttttagagctagaaatagcaagttaaaataaggctagtccgttatcaacttgaaaaagtggcaccgagtcggtgctttt

SEQ ID NO: 551 - RNA, 100 nt, synthetic construct
  source 1..100: mol_type = other RNA
tgtttgcagccagtcaggcagttttagagctagaaatagcaagttaaaataaggctagtccgttatcaacttgaaaaagtggcaccgagtcggtgctttt

SEQ ID NO: 552 - RNA, 100 nt, synthetic construct
  source 1..100: mol_type = other RNA
ctgactggctgcaaacataagttttagagctagaaatagcaagttaaaataaggctagtccgttatcaacttgaaaaagtggcaccgagtcggtgctttt

SEQ ID NO: 553 - RNA, 100 nt, synthetic construct
  source 1..100: mol_type = other RNA
cttacagcttctgcttcagagttttagagctagaaatagcaagttaaaataaggctagtccgttatcaacttgaaaaagtggcaccgagtcggtgctttt

SEQ ID NO: 554 - RNA, 100 nt, synthetic construct
  source 1..100: mol_type = other RNA
ggtggtggctgaaaaacacagttttagagctagaaatagcaagttaaaataaggctagtccgttatcaacttgaaaaagtggcaccgagtcggtgctttt

SEQ ID NO: 555 - RNA, 100 nt, synthetic construct
  source 1..100: mol_type = other RNA
tgacaagcagttagatgaaagttttagagctagaaatagcaagttaaaataaggctagtccgttatcaacttgaaaaagtggcaccgagtcggtgctttt

SEQ ID NO: 556 - RNA, 100 nt, synthetic construct
  source 1..100: mol_type = other RNA
ctgacaagcagttagatgaagttttagagctagaaatagcaagttaaaataaggctagtccgttatcaacttgaaaaagtggcaccgagtcggtgctttt

SEQ ID NO: 557 - RNA, 100 nt, synthetic construct
  source 1..100: mol_type = other RNA
ttttacagaattgatatatagttttagagctagaaatagcaagttaaaataaggctagtccgttatcaacttgaaaaagtggcaccgagtcggtgctttt

SEQ ID NO: 558 - RNA, 100 nt, synthetic construct
  source 1..100: mol_type = other RNA
cgggggcagccctctcctttgttttagagctagaaatagcaagttaaaataaggctagtccgttatcaacttgaaaaagtggcaccgagtcggtgctttt

SEQ ID NO: 559 - RNA, 100 nt, synthetic construct
  source 1..100: mol_type = other RNA
tgtaaccaacctaaaggagagttttagagctagaaatagcaagttaaaataaggctagtccgttatcaacttgaaaaagtggcaccgagtcggtgctttt

SEQ ID NO: 560 - RNA, 100 nt, synthetic construct
  source 1..100: mol_type = other RNA
acaggtgcagcagtgatcaagttttagagctagaaatagcaagttaaaataaggctagtccgttatcaacttgaaaaagtggcaccgagtcggtgctttt

SEQ ID NO: 561 - RNA, 100 nt, synthetic construct
  source 1..100: mol_type = other RNA
gggtcctgccagtcttgtcagttttagagctagaaatagcaagttaaaataaggctagtccgttatcaacttgaaaaagtggcaccgagtcggtgctttt

SEQ ID NO: 562 - RNA, 100 nt, synthetic construct
  source 1..100: mol_type = other RNA
ctgccagtcttgtcagggcggttttagagctagaaatagcaagttaaaataaggctagtccgttatcaacttgaaaaagtggcaccgagtcggtgctttt

SEQ ID NO: 563 - RNA, 100 nt, synthetic construct
  source 1..100: mol_type = other RNA
gctgtcccagggtgggtacagttttagagctagaaatagcaagttaaaataaggctagtccgttatcaacttgaaaaagtggcaccgagtcggtgctttt

SEQ ID NO: 564 - RNA, 100 nt, synthetic construct
  source 1..100: mol_type = other RNA
tcccagggtgggtacatggtgttttagagctagaaatagcaagttaaaataaggctagtccgttatcaacttgaaaaagtggcaccgagtcggtgctttt

SEQ ID NO: 565 - RNA, 100 nt, synthetic construct
  source 1..100: mol_type = other RNA
gtcatgcagatcattgtgaagttttagagctagaaatagcaagttaaaataaggctagtccgttatcaacttgaaaaagtggcaccgagtcggtgctttt

SEQ ID NO: 566 - RNA, 100 nt, synthetic construct
  source 1..100: mol_type = other RNA
ttgtgtctacaggaagagaggttttagagctagaaatagcaagttaaaataaggctagtccgttatcaacttgaaaaagtggcaccgagtcggtgctttt

SEQ ID NO: 567 - RNA, 100 nt, synthetic construct
  source 1..100: mol_type = other RNA
tgtgtctacaggaagagagagttttagagctagaaatagcaagttaaaataaggctagtccgttatcaacttgaaaaagtggcaccgagtcggtgctttt

SEQ ID NO: 568 - RNA, 100 nt, synthetic construct
  source 1..100: mol_type = other RNA
gtgtctacaggaagagagaggttttagagctagaaatagcaagttaaaataaggctagtccgttatcaacttgaaaaagtggcaccgagtcggtgctttt

SEQ ID NO: 569 - RNA, 100 nt, synthetic construct
  source 1..100: mol_type = other RNA
tactgtaccagacaaactcggttttagagctagaaatagcaagttaaaataaggctagtccgttatcaacttgaaaaagtggcaccgagtcggtgctttt

SEQ ID NO: 570 - RNA, 100 nt, synthetic construct
  source 1..100: mol_type = other RNA
ttacaggggcctgaacaaacgttttagagctagaaatagcaagttaaaataaggctagtccgttatcaacttgaaaaagtggcaccgagtcggtgctttt

SEQ ID NO: 571 - RNA, 100 nt, synthetic construct
  source 1..100: mol_type = other RNA
tacaggggcctgaacaaacagttttagagctagaaatagcaagttaaaataaggctagtccgttatcaacttgaaaaagtggcaccgagtcggtgctttt

SEQ ID NO: 572 - RNA, 100 nt, synthetic construct
  source 1..100: mol_type = other RNA
ccagtgccgacgtaagtaaggttttagagctagaaatagcaagttaaaataaggctagtccgttatcaacttgaaaaagtggcaccgagtcggtgctttt

SEQ ID NO: 573 - RNA, 100 nt, synthetic construct
  source 1..100: mol_type = other RNA
cagtgccgacgtaagtaagagttttagagctagaaatagcaagttaaaataaggctagtccgttatcaacttgaaaaagtggcaccgagtcggtgctttt

SEQ ID NO: 574 - RNA, 100 nt, synthetic construct
  source 1..100: mol_type = other RNA
aaatactcaccatggtttctgttttagagctagaaatagcaagttaaaataaggctagtccgttatcaacttgaaaaagtggcaccgagtcggtgctttt

SEQ ID NO: 575 - RNA, 100 nt, synthetic construct
  source 1..100: mol_type = other RNA
ggaactgaaagaaaggcagagttttagagctagaaatagcaagttaaaataaggctagtccgttatcaacttgaaaaagtggcaccgagtcggtgctttt

SEQ ID NO: 576 - RNA, 100 nt, synthetic construct
  source 1..100: mol_type = other RNA
cggcaaggactcaagtgtgagttttagagctagaaatagcaagttaaaataaggctagtccgttatcaacttgaaaaagtggcaccgagtcggtgctttt

SEQ ID NO: 577 - RNA, 100 nt, synthetic construct
  source 1..100: mol_type = other RNA
tcatagatgccagacaaagggttttagagctagaaatagcaagttaaaataaggctagtccgttatcaacttgaaaaagtggcaccgagtcggtgctttt

SEQ ID NO: 578 - RNA, 100 nt, synthetic construct
  source 1..100: mol_type = other RNA
acaggtaggagcatgtgccggttttagagctagaaatagcaagttaaaataaggctagtccgttatcaacttgaaaaagtggcaccgagtcggtgctttt

SEQ ID NO: 579 - RNA, 100 nt, synthetic construct
  source 1..100: mol_type = other RNA
actgaacagatcttcagagagttttagagctagaaatagcaagttaaaataaggctagtccgttatcaacttgaaaaagtggcaccgagtcggtgctttt

SEQ ID NO: 580 - RNA, 100 nt, synthetic construct
  source 1..100: mol_type = other RNA
ctacctctttttcccggtgtgttttagagctagaaatagcaagttaaaataaggctagtccgttatcaacttgaaaaagtggcaccgagtcggtgctttt

SEQ ID NO: 581 - RNA, 100 nt, synthetic construct
  source 1..100: mol_type = other RNA
cagagcctcagggcatttccgttttagagctagaaatagcaagttaaaataaggctagtccgttatcaacttgaaaaagtggcaccgagtcggtgctttt

SEQ ID NO: 582 - RNA, 100 nt, synthetic construct
  source 1..100: mol_type = other RNA
agagcctcagggcatttcctgttttagagctagaaatagcaagttaaaataaggctagtccgttatcaacttgaaaaagtggcaccgagtcggtgctttt

SEQ ID NO: 583 - RNA, 100 nt, synthetic construct
  source 1..100: mol_type = other RNA
gcagattaaactaaaaattggttttagagctagaaatagcaagttaaaataaggctagtccgttatcaacttgaaaaagtggcaccgagtcggtgctttt

SEQ ID NO: 584 - RNA, 100 nt, synthetic construct
  source 1..100: mol_type = other RNA
caatcaatttttcgcaataagttttagagctagaaatagcaagttaaaataaggctagtccgttatcaacttgaaaaagtggcaccgagtcggtgctttt

SEQ ID NO: 585 - RNA, 100 nt, synthetic construct
  source 1..100: mol_type = other RNA
gtacattccagaccaaggtagttttagagctagaaatagcaagttaaaataaggctagtccgttatcaacttgaaaaagtggcaccgagtcggtgctttt

SEQ ID NO: 586 - RNA, 100 nt, synthetic construct
  source 1..100: mol_type = other RNA
cctcttacgtcgctctggaagttttagagctagaaatagcaagttaaaataaggctagtccgttatcaacttgaaaaagtggcaccgagtcggtgctttt

SEQ ID NO: 587 - RNA, 100 nt, synthetic construct
  source 1..100: mol_type = other RNA
acctgggggaaggagaaccagttttagagctagaaatagcaagttaaaataaggctagtccgttatcaacttgaaaaagtggcaccgagtcggtgctttt

SEQ ID NO: 588 - RNA, 100 nt, synthetic construct
  source 1..100: mol_type = other RNA
ctgcagttccttcattccaagttttagagctagaaatagcaagttaaaataaggctagtccgttatcaacttgaaaaagtggcaccgagtcggtgctttt

SEQ ID NO: 589 - RNA, 100 nt, synthetic construct
  source 1..100: mol_type = other RNA
ttacctgtagactattccttgttttagagctagaaatagcaagttaaaataaggctagtccgttatcaacttgaaaaagtggcaccgagtcggtgctttt

SEQ ID NO: 590 - RNA, 100 nt, synthetic construct
  source 1..100: mol_type = other RNA
acctctggggcgatgtagtcgttttagagctagaaatagcaagttaaaataaggctagtccgttatcaacttgaaaaagtggcaccgagtcggtgctttt

SEQ ID NO: 591 - RNA, 100 nt, synthetic construct
  source 1..100: mol_type = other RNA
agcaggccctggccgactgcgttttagagctagaaatagcaagttaaaataaggctagtccgttatcaacttgaaaaagtggcaccgagtcggtgctttt

SEQ ID NO: 592 - RNA, 100 nt, synthetic construct
  source 1..100: mol_type = other RNA
ggctgtaagctggggaacgggttttagagctagaaatagcaagttaaaataaggctagtccgttatcaacttgaaaaagtggcaccgagtcggtgctttt

SEQ ID NO: 593 - RNA, 100 nt, synthetic construct
  source 1..100: mol_type = other RNA
ggagcagcggctgaacttcggttttagagctagaaatagcaagttaaaataaggctagtccgttatcaacttgaaaaagtggcaccgagtcggtgctttt

SEQ ID NO: 594 - RNA, 100 nt, synthetic construct
  source 1..100: mol_type = other RNA
cagctccctgggggttgaccgttttagagctagaaatagcaagttaaaataaggctagtccgttatcaacttgaaaaagtggcaccgagtcggtgctttt

SEQ ID NO: 595 - RNA, 100 nt, synthetic construct
  source 1..100: mol_type = other RNA
cctgggggttgaccaggagcgttttagagctagaaatagcaagttaaaataaggctagtccgttatcaacttgaaaaagtggcaccgagtcggtgctttt

SEQ ID NO: 596 - RNA, 100 nt, synthetic construct
  source 1..100: mol_type = other RNA
agagtgccagcgaaaccacggttttagagctagaaatagcaagttaaaataaggctagtccgttatcaacttgaaaaagtggcaccgagtcggtgctttt

SEQ ID NO: 597 - RNA, 100 nt, synthetic construct
  source 1..100: mol_type = other RNA
gagtgccagcgaaaccacgagttttagagctagaaatagcaagttaaaataaggctagtccgttatcaacttgaaaaagtggcaccgagtcggtgctttt

SEQ ID NO: 598 - RNA, 100 nt, synthetic construct
  source 1..100: mol_type = other RNA
ttcacaggacaagtacatgggttttagagctagaaatagcaagttaaaataaggctagtccgttatcaacttgaaaaagtggcaccgagtcggtgctttt

SEQ ID NO: 599 - RNA, 100 nt, synthetic construct
  source 1..100: mol_type = other RNA
gtctcgcttctgtggcacaggttttagagctagaaatagcaagttaaaataaggctagtccgttatcaacttgaaaaagtggcaccgagtcggtgctttt

SEQ ID NO: 600 - RNA, 100 nt, synthetic construct
  source 1..100: mol_type = other RNA
gcacctgcaggtgaggcctggttttagagctagaaatagcaagttaaaataaggctagtccgttatcaacttgaaaaagtggcaccgagtcggtgctttt

SEQ ID NO: 601 - RNA, 100 nt, synthetic construct
  source 1..100: mol_type = other RNA
ggaacagctcatccccaactgttttagagctagaaatagcaagttaaaataaggctagtccgttatcaacttgaaaaagtggcaccgagtcggtgctttt

SEQ ID NO: 602 - RNA, 119 nt, synthetic construct
  source 1..119: mol_type = other RNA
gttctgtcttttggtcaggacaaccgtctagctataagtgctgcagggtgtgagaaactcctattgctggacgatgtctcttacgaggcattagcacccctgctccttgagctcctgcg

SEQ ID NO: 603 - RNA, 119 nt, synthetic construct
  source 1..119: mol_type = other RNA
gttctgtcttttggtcaggacaaccgtctagctataagtgctgcagggtgtgagaaactcctattgctggacgatgtctcttacgaggcattagcaccaccaaccgggccttgtgctac

SEQ ID NO: 604 - RNA, 119 nt, synthetic construct
  source 1..119: mol_type = other RNA
gttctgtcttttggtcaggacaaccgtctagctataagtgctgcagggtgtgagaaactcctattgctggacgatgtctcttacgaggcattagcacgcgatggcctcatcatagctct

SEQ ID NO: 605 - RNA, 119 nt, synthetic construct
  source 1..119: mol_type = other RNA
gttctgtcttttggtcaggacaaccgtctagctataagtgctgcagggtgtgagaaactcctattgctggacgatgtctcttacgaggcattagcacgaagagcgctggggatgtcgtc

SEQ ID NO: 606 - RNA, 119 nt, synthetic construct
  source 1..119: mol_type = other RNA
gttctgtcttttggtcaggacaaccgtctagctataagtgctgcagggtgtgagaaactcctattgctggacgatgtctcttacgaggcattagcacaggagcggcgcatccaccagga

SEQ ID NO: 607 - RNA, 119 nt, synthetic construct
  source 1..119: mol_type = other RNA
gttctgtcttttggtcaggacaaccgtctagctataagtgctgcagggtgtgagaaactcctattgctggacgatgtctcttacgaggcattagcacccgcggagcgtgagaggtggga

SEQ ID NO: 608 - RNA, 119 nt, synthetic construct
  source 1..119: mol_type = other RNA
gttctgtcttttggtcaggacaaccgtctagctataagtgctgcagggtgtgagaaactcctattgctggacgatgtctcttacgaggcattagcacaggccaagcacgtgagggtgcc

SEQ ID NO: 609 - RNA, 119 nt, synthetic construct
  source 1..119: mol_type = other RNA
gttctgtcttttggtcaggacaaccgtctagctataagtgctgcagggtgtgagaaactcctattgctggacgatgtctcttacgaggcattagcactgaccccgtgacccggagcccc

SEQ ID NO: 610 - RNA, 119 nt, synthetic construct
  source 1..119: mol_type = other RNA
gttctgtcttttggtcaggacaaccgtctagctataagtgctgcagggtgtgagaaactcctattgctggacgatgtctcttacgaggcattagcacacgcattcatctctgagaatgg

SEQ ID NO: 611 - RNA, 119 nt, synthetic construct
  source 1..119: mol_type = other RNA
gttctgtcttttggtcaggacaaccgtctagctataagtgctgcagggtgtgagaaactcctattgctggacgatgtctcttacgaggcattagcacatctctgagaatggctgggtgg

SEQ ID NO: 612 - RNA, 119 nt, synthetic construct
  source 1..119: mol_type = other RNA
gttctgtcttttggtcaggacaaccgtctagctataagtgctgcagggtgtgagaaactcctattgctggacgatgtctcttacgaggcattagcactcagagatgaatgcgtcaataa

SEQ ID NO: 613 - RNA, 119 nt, synthetic construct
  source 1..119: mol_type = other RNA
gttctgtcttttggtcaggacaaccgtctagctataagtgctgcagggtgtgagaaactcctattgctggacgatgtctcttacgaggcattagcaccaccaaccgtgccctgtgctac

SEQ ID NO: 614 - RNA, 119 nt, synthetic construct
  source 1..119: mol_type = other RNA
gttctgtcttttggtcaggacaaccgtctagctataagtgctgcagggtgtgagaaactcctattgctggacgatgtctcttacgaggcattagcaccagcgcttcttcttcgcgattc

SEQ ID NO: 615 - RNA, 119 nt, synthetic construct
  source 1..119: mol_type = other RNA
gttctgtcttttggtcaggacaaccgtctagctataagtgctgcagggtgtgagaaactcctattgctggacgatgtctcttacgaggcattagcacaggctaagcatgtgagggtgcc

SEQ ID NO: 616 - RNA, 119 nt, synthetic construct
  source 1..119: mol_type = other RNA
gttctgtcttttggtcaggacaaccgtctagctataagtgctgcagggtgtgagaaactcctattgctggacgatgtctcttacgaggcattagcactcagagatgaatgcgtcaatga

SEQ ID NO: 617 - RNA, 119 nt, synthetic construct; identical to SEQ ID NO: 464
  source 1..119: mol_type = other RNA

SEQ ID NO: 618 - RNA, 119 nt, synthetic construct; identical to SEQ ID NO: 465
  source 1..119: mol_type = other RNA

SEQ ID NO: 619 - RNA, 119 nt, synthetic construct; identical to SEQ ID NO: 466
  source 1..119: mol_type = other RNA

SEQ ID NO: 620 - RNA, 119 nt, synthetic construct; identical to SEQ ID NO: 467
  source 1..119: mol_type = other RNA

SEQ ID NO: 621 - RNA, 119 nt, synthetic construct; identical to SEQ ID NO: 468
  source 1..119: mol_type = other RNA

SEQ ID NO: 622 - RNA, 119 nt, synthetic construct; identical to SEQ ID NO: 469
  source 1..119: mol_type = other RNA

SEQ ID NO: 623 - RNA, 119 nt, synthetic construct; identical to SEQ ID NO: 470
  source 1..119: mol_type = other RNA

SEQ ID NO: 624 - RNA, 119 nt, synthetic construct; identical to SEQ ID NO: 471
  source 1..119: mol_type = other RNA

SEQ ID NO: 625 - RNA, 119 nt, synthetic construct; identical to SEQ ID NO: 472
  source 1..119: mol_type = other RNA

SEQ ID NO: 626 - RNA, 119 nt, synthetic construct; identical to SEQ ID NO: 473
  source 1..119: mol_type = other RNA

SEQ ID NO: 627 - RNA, 119 nt, synthetic construct; identical to SEQ ID NO: 474
  source 1..119: mol_type = other RNA

SEQ ID NO: 628 - RNA, 119 nt, synthetic construct; identical to SEQ ID NO: 475
  source 1..119: mol_type = other RNA

SEQ ID NO: 629 - RNA, 119 nt, synthetic construct; identical to SEQ ID NO: 476
  source 1..119: mol_type = other RNA

SEQ ID NO: 630 - RNA, 119 nt, synthetic construct; identical to SEQ ID NO: 477
  source 1..119: mol_type = other RNA

SEQ ID NO: 631 - RNA, 119 nt, synthetic construct; identical to SEQ ID NO: 478
  source 1..119: mol_type = other RNA

SEQ ID NO: 632 - RNA, 119 nt, synthetic construct; identical to SEQ ID NO: 479
  source 1..119: mol_type = other RNA

SEQ ID NO: 633 - RNA, 119 nt, synthetic construct; identical to SEQ ID NO: 480
  source 1..119: mol_type = other RNA

SEQ ID NO: 634 - RNA, 119 nt, synthetic construct; identical to SEQ ID NO: 481
  source 1..119: mol_type = other RNA

SEQ ID NO: 635 - RNA, 119 nt, synthetic construct; identical to SEQ ID NO: 482
  source 1..119: mol_type = other RNA

SEQ ID NO: 636 - RNA, 119 nt, synthetic construct; identical to SEQ ID NO: 483
  source 1..119: mol_type = other RNA

SEQ ID NO: 637 - RNA, 119 nt, synthetic construct; identical to SEQ ID NO: 484
  source 1..119: mol_type = other RNA

SEQ ID NO: 638 - RNA, 119 nt, synthetic construct; identical to SEQ ID NO: 485
  source 1..119: mol_type = other RNA

SEQ ID NO: 639 - RNA, 119 nt, synthetic construct; identical to SEQ ID NO: 486
  source 1..119: mol_type = other RNA

SEQ ID NO: 640 - RNA, 119 nt, synthetic construct; identical to SEQ ID NO: 487
  source 1..119: mol_type = other RNA

SEQ ID NO: 641 - RNA, 119 nt, synthetic construct; identical to SEQ ID NO: 488
  source 1..119: mol_type = other RNA

SEQ ID NO: 642 - RNA, 119 nt, synthetic construct; identical to SEQ ID NO: 489
  source 1..119: mol_type = other RNA

SEQ ID NO: 643 - RNA, 119 nt, synthetic construct; identical to SEQ ID NO: 490
  source 1..119: mol_type = other RNA

SEQ ID NO: 644 - RNA, 119 nt, synthetic construct; identical to SEQ ID NO: 491
  source 1..119: mol_type = other RNA

SEQ ID NO: 645 - RNA, 100 nt, synthetic construct; identical to SEQ ID NO: 500
  source 1..100: mol_type = other RNA

SEQ ID NO: 646 - RNA, 100 nt, synthetic construct
  source 1..100: mol_type = other RNA
cacagcccaagatagttaaggttttagagctagaaatagcaagttaaaataaggctagtccgttatcaacttgaaaaagtggcaccgagtcggtgctttt

SEQ ID NO: 647 - RNA, 100 nt, synthetic construct
  source 1..100: mol_type = other RNA
acagcccaagatagttaagtgttttagagctagaaatagcaagttaaaataaggctagtccgttatcaacttgaaaaagtggcaccgagtcggtgctttt

SEQ ID NO: 648 - RNA, 100 nt, synthetic construct
  source 1..100: mol_type = other RNA
cagcccaagatagttaagtggttttagagctagaaatagcaagttaaaataaggctagtccgttatcaacttgaaaaagtggcaccgagtcggtgctttt

SEQ ID NO: 649 - RNA, 100 nt, synthetic construct
  source 1..100: mol_type = other RNA
ttaccccacttaactatcttgttttagagctagaaatagcaagttaaaataaggctagtccgttatcaacttgaaaaagtggcaccgagtcggtgctttt

SEQ ID NO: 650 - RNA, 100 nt, synthetic construct
  source 1..100: mol_type = other RNA
cttaccccacttaactatctgttttagagctagaaatagcaagttaaaataaggctagtccgttatcaacttgaaaaagtggcaccgagtcggtgctttt

SEQ ID NO: 651 - RNA, 100 nt, synthetic construct
  source 1..100: mol_type = other RNA
tcgatctatgaaaaagacaggttttagagctagaaatagcaagttaaaataaggctagtccgttatcaacttgaaaaagtggcaccgagtcggtgctttt

SEQ ID NO: 652 - RNA, 99 nt, synthetic construct
  source 1..99: mol_type = other RNA
ctcacgctggatagcctccgttttagagctagaaatagcaagttaaaataaggctagtccgttatcaacttgaaaaagtggcaccgagtcggtgctttt

SEQ ID NO: 653 - RNA, 98 nt, synthetic construct
  source 1..98: mol_type = other RNA
tcacgctggatagcctccgttttagagctagaaatagcaagttaaaataaggctagtccgttatcaacttgaaaaagtggcaccgagtcggtgctttt

SEQ ID NO: 654 - RNA, 100 nt, synthetic construct
  source 1..100: mol_type = other RNA
cgcgagcacagctaaggccagttttagagctagaaatagcaagttaaaataaggctagtccgttatcaacttgaaaaagtggcaccgagtcggtgctttt

SEQ ID NO: 655 - RNA, 100 nt, synthetic construct
  source 1..100: mol_type = other RNA
gagtagcgcgagcacagctagttttagagctagaaatagcaagttaaaataaggctagtccgttatcaacttgaaaaagtggcaccgagtcggtgctttt

SEQ ID NO: 656 - RNA, 100 nt, synthetic construct
  source 1..100: mol_type = other RNA
gctactctctctttctggccgttttagagctagaaatagcaagttaaaataaggctagtccgttatcaacttgaaaaagtggcaccgagtcggtgctttt

SEQ ID NO: 657 - RNA, 100 nt, synthetic construct
  source 1..100: mol_type = other RNA
cgtgagtaaacctgaatcttgttttagagctagaaatagcaagttaaaataaggctagtccgttatcaacttgaaaaagtggcaccgagtcggtgctttt

SEQ ID NO: 658 - RNA, 100 nt, synthetic construct
  source 1..100: mol_type = other RNA
tttgactttccattctctgcgttttagagctagaaatagcaagttaaaataaggctagtccgttatcaacttgaaaaagtggcaccgagtcggtgctttt

SEQ ID NO: 659 - RNA, 100 nt, synthetic construct
  source 1..100: mol_type = other RNA
acccagacacatagcaattcgttttagagctagaaatagcaagttaaaataaggctagtccgttatcaacttgaaaaagtggcaccgagtcggtgctttt

SEQ ID NO: 660 - RNA, 100 nt, synthetic construct
  source 1..100: mol_type = other RNA
aagtcaacttcaatgtcggagttttagagctagaaatagcaagttaaaataaggctagtccgttatcaacttgaaaaagtggcaccgagtcggtgctttt

SEQ ID NO: 661 - RNA, 100 nt, synthetic construct
  source 1..100: mol_type = other RNA
cagtaagtcaacttcaatgtgttttagagctagaaatagcaagttaaaataaggctagtccgttatcaacttgaaaaagtggcaccgagtcggtgctttt

SEQ ID NO: 662 - RNA, 100 nt, synthetic construct
  source 1..100: mol_type = other RNA
gaagttgacttactgaagaagttttagagctagaaatagcaagttaaaataaggctagtccgttatcaacttgaaaaagtggcaccgagtcggtgctttt

SEQ ID NO: 663 - RNA, 100 nt, synthetic construct
  source 1..100: mol_type = other RNA
tggagagagaattgaaaaaggttttagagctagaaatagcaagttaaaataaggctagtccgttatcaacttgaaaaagtggcaccgagtcggtgctttt

SEQ ID NO: 664 - RNA, 100 nt, synthetic construct
  source 1..100: mol_type = other RNA
ttcagacttgtctttcagcagttttagagctagaaatagcaagttaaaataaggctagtccgttatcaacttgaaaaagtggcaccgagtcggtgctttt

SEQ ID NO: 665 - RNA, 100 nt, synthetic construct
  source 1..100: mol_type = other RNA
acttgtctttcagcaaggacgttttagagctagaaatagcaagttaaaataaggctagtccgttatcaacttgaaaaagtggcaccgagtcggtgctttt

SEQ ID NO: 666 - RNA, 100 nt, synthetic construct
  source 1..100: mol_type = other RNA
atactcatctttttcagtgggttttagagctagaaatagcaagttaaaataaggctagtccgttatcaacttgaaaaagtggcaccgagtcggtgctttt

SEQ ID NO: 667 - RNA, 100 nt, synthetic construct
  source 1..100: mol_type = other RNA
catactcatctttttcagtggttttagagctagaaatagcaagttaaaataaggctagtccgttatcaacttgaaaaagtggcaccgagtcggtgctttt

SEQ ID NO: 668 - RNA, 100 nt, synthetic construct
  source 1..100: mol_type = other RNA
gcatactcatctttttcagtgttttagagctagaaatagcaagttaaaataaggctagtccgttatcaacttgaaaaagtggcaccgagtcggtgctttt

SEQ ID NO: 669 - RNA, 100 nt, synthetic construct
  source 1..100: mol_type = other RNA
ggcatactcatctttttcaggttttagagctagaaatagcaagttaaaataaggctagtccgttatcaacttgaaaaagtggcaccgagtcggtgctttt

SEQ ID NO: 670 - RNA, 100 nt, synthetic construct
  source 1..100: mol_type = other RNA
agtcacatggttcacacggcgttttagagctagaaatagcaagttaaaataaggctagtccgttatcaacttgaaaaagtggcaccgagtcggtgctttt

SEQ ID NO: 671 - RNA, 100 nt, synthetic construct
  source 1..100: mol_type = other RNA
acaaagtcacatggttcacagttttagagctagaaatagcaagttaaaataaggctagtccgttatcaacttgaaaaagtggcaccgagtcggtgctttt

SEQ ID NO: 672 - RNA, 100 nt, synthetic construct
  source 1..100: mol_type = other RNA
tgggctgtgacaaagtcacagttttagagctagaaatagcaagttaaaataaggctagtccgttatcaacttgaaaaagtggcaccgagtcggtgctttt

SEQ ID NO: 673 - RNA, 100 nt, synthetic construct
  source 1..100: mol_type = other RNA
gcaaccatggctcgtcgggcgttttagagctagaaatagcaagttaaaataaggctagtccgttatcaacttgaaaaagtggcaccgagtcggtgctttt

SEQ ID NO: 674 - RNA, 100 nt, synthetic construct
  source 1..100: mol_type = other RNA
actcaccaaagcagtgcagcgttttagagctagaaatagcaagttaaaataaggctagtccgttatcaacttgaaaaagtggcaccgagtcggtgctttt

SEQ ID NO: 675 - RNA, 100 nt, synthetic construct
  source 1..100: mol_type = other RNA
ctcaccgctgcttgggatacgttttagagctagaaatagcaagttaaaataaggctagtccgttatcaacttgaaaaagtggcaccgagtcggtgctttt

SEQ ID NO: 676 - RNA, 20 nt, synthetic construct
  source 1..20: mol_type = other RNA
gctctcaccgggcgccagct

SEQ ID NO: 677 - RNA, 20 nt, synthetic construct
  source 1..20: mol_type = other RNA
ctcaccgggcgccagcttgg

SEQ ID NO: 678 - RNA, 20 nt, synthetic construct
  source 1..20: mol_type = other RNA
ccctttcctaggcaaggaga

SEQ ID NO: 679 - RNA, 20 nt, synthetic construct
  source 1..20: mol_type = other RNA
gcctaggaaagggggaagca

SEQ ID NO: 680 - RNA, 20 nt, synthetic construct
  source 1..20: mol_type = other RNA
cctggagtcgcagtaccagg

SEQ ID NO: 681 - RNA, 20 nt, synthetic construct
  source 1..20: mol_type = other RNA
gtaccaggtgggcccgctac

SEQ ID NO: 682 - RNA, 20 nt, synthetic construct
  source 1..20: mol_type = other RNA
cccactcaccggcaagttgt

SEQ ID NO: 683 - RNA, 20 nt, synthetic construct
  source 1..20: mol_type = other RNA
ccaggtggccatcaaacacg

SEQ ID NO: 684 - RNA, 20 nt, synthetic construct
  source 1..20: mol_type = other RNA
tgatggccacctggaagccc

SEQ ID NO: 685 - RNA, 20 nt, synthetic construct
  source 1..20: mol_type = other RNA
atggccacctggaagcccag

SEQ ID NO: 686 - RNA, 20 nt, synthetic construct
  source 1..20: mol_type = other RNA
actcaccagctctccccagt

SEQ ID NO: 687 - RNA, 20 nt, synthetic construct
  source 1..20: mol_type = other RNA
cattaggctgcaggggcgag

SEQ ID NO: 688 - RNA, 20 nt, synthetic construct
  source 1..20: mol_type = other RNA
attaggctgcaggggcgagg

SEQ ID NO: 689 - RNA, 20 nt, synthetic construct
  source 1..20: mol_type = other RNA
ggcaggtgctggaggccgtg

SEQ ID NO: 690 - RNA, 20 nt, synthetic construct
  source 1..20: mol_type = other RNA
accatcgaagtccgtgtaga

SEQ ID NO: 691 - RNA, 20 nt, synthetic construct
  source 1..20: mol_type = other RNA
ctcgggtccctgtgagccaa

SEQ ID NO: 692 - RNA, 20 nt, synthetic construct
  source 1..20: mol_type = other RNA
gccaggttttcttcaggcag

SEQ ID NO: 693 - RNA, 20 nt, synthetic construct
  source 1..20: mol_type = other RNA
gctgacattctgcagaaagg

SEQ ID NO: 694 - RNA, 20 nt, synthetic construct
  source 1..20: mol_type = other RNA
aatgtcagcatctcattaga

SEQ ID NO: 695 - RNA, 20 nt, synthetic construct
  source 1..20: mol_type = other RNA
gcaagatgttctcctgcccc

SEQ ID NO: 696 - RNA, 20 nt, synthetic construct
  source 1..20: mol_type = other RNA
gcaaaccaaaaatcgcaagc

SEQ ID NO: 697 - RNA, 20 nt, synthetic construct
  source 1..20: mol_type = other RNA
tagctacctgactccagtat

SEQ ID NO: 698 - RNA, 20 nt, synthetic construct
  source 1..20: mol_type = other RNA
tcatcaaactggagaagggt

SEQ ID NO: 699 - RNA, 20 nt, synthetic construct
  source 1..20: mol_type = other RNA
gtctcagctgcaggaacgtg

SEQ ID NO: 700 - RNA, 19 nt, synthetic construct
  source 1..19: mol_type = other RNA
gataaattgcaagaaaaag

SEQ ID NO: 701 - RNA, 20 nt, synthetic construct
  source 1..20: mol_type = other RNA
cacctccactgtttagcttc

SEQ ID NO: 702 - RNA, 20 nt, synthetic construct
  source 1..20: mol_type = other RNA
ttccccagataatctgatag

SEQ ID NO: 703 - RNA, 20 nt, synthetic construct
  source 1..20: mol_type = other RNA
cccagataatctgatagtgg

SEQ ID NO: 704 - RNA, 20 nt, synthetic construct
  source 1..20: mol_type = other RNA
tcctcgcacaggagaatatg

SEQ ID NO: 705 - RNA, 20 nt, synthetic construct
  source 1..20: mol_type = other RNA
gttaagtacctcctgagaca

SEQ ID NO: 706 - RNA, 20 nt, synthetic construct
  source 1..20: mol_type = other RNA
tctctgtaggtgaattccaa

SEQ ID NO: 707 - RNA, 20 nt, synthetic construct
  source 1..20: mol_type = other RNA
tcagaaccgtctctgtgagc

SEQ ID NO: 708 - RNA, 20 nt, synthetic construct
  source 1..20: mol_type = other RNA
acttcggcaagactttgagg

SEQ ID NO: 709 - RNA, 20 nt, synthetic construct
  source 1..20: mol_type = other RNA
tacacaaaatgaaaagctga

SEQ ID NO: 710 - RNA, 20 nt, synthetic construct
  source 1..20: mol_type = other RNA
gccctcctaaggtggaattg

SEQ ID NO: 711 - RNA, 20 nt, synthetic construct
  source 1..20: mol_type = other RNA
cctacagttgaaagcacact

SEQ ID NO: 712 - RNA, 20 nt, synthetic construct
  source 1..20: mol_type = other RNA
gcaccaggttgagcttattg

SEQ ID NO: 713 - RNA, 19 nt, synthetic construct
  source 1..19: mol_type = other RNA
tacctcaataagctcaacc

SEQ ID NO: 714 - RNA, 20 nt, synthetic construct
  source 1..20: mol_type = other RNA
atctcgctacacacagataa

SEQ ID NO: 715 - RNA, 20 nt, synthetic construct
  source 1..20: mol_type = other RNA
ggcgatgccggaggagggtt

SEQ ID NO: 716 - RNA, 20 nt, synthetic construct
  source 1..20: mol_type = other RNA
cggtgcggcgcaggccctat

SEQ ID NO: 717 - RNA, 20 nt, synthetic construct
  source 1..20: mol_type = other RNA
tcggtgcggcgcaggcccta

SEQ ID NO: 718 - RNA, 20 nt, synthetic construct
  source 1..20: mol_type = other RNA
ctcaccccaagtgactcgag

SEQ ID NO: 719 - RNA, 20 nt, synthetic construct
  source 1..20: mol_type = other RNA
tcctgggggcacagggttag

SEQ ID NO: 720 - RNA, 20 nt, synthetic construct
  source 1..20: mol_type = other RNA
caggacctcagcaggacccc

SEQ ID NO: 721 - RNA, 20 nt, synthetic construct
  source 1..20: mol_type = other RNA
ggtacacatccaggtgacgc

SEQ ID NO: 722 - RNA, 20 nt, synthetic construct
  source 1..20: mol_type = other RNA
tttgcagataaccttctgtt

SEQ ID NO: 723 - RNA, 20 nt, synthetic construct
  source 1..20: mol_type = other RNA
gccatacctatccgtggcct

SEQ ID NO: 724 - RNA, 20 nt, synthetic construct
  source 1..20: mol_type = other RNA
gacctacaataagggggaaa

SEQ ID NO: 725 - RNA, 20 nt, synthetic construct
  source 1..20: mol_type = other RNA
acagacacctaaaatgtgca

SEQ ID NO: 726 - RNA, 20 nt, synthetic construct
  source 1..20: mol_type = other RNA
ttttaggtgtctgtttcatg

SEQ ID NO: 727 - RNA, 20 nt, synthetic construct
  source 1..20: mol_type = other RNA
tatttcctgtatcaagcaaa

SEQ ID NO: 728 - RNA, 20 nt, synthetic construct
  source 1..20: mol_type = other RNA
ttgatacaggaaatatatcc

SEQ ID NO: 729 - RNA, 20 nt, synthetic construct
  source 1..20: mol_type = other RNA
aacaggttgcgggaatccaa

SEQ ID NO: 730 - RNA, 20 nt, synthetic construct
  source 1..20: mol_type = other RNA
caaaggataattcagtgtca

SEQ ID NO: 731 - RNA, 20 nt, synthetic construct
  source 1..20: mol_type = other RNA
acgaggagatatttttaatc

SEQ ID NO: 732 - RNA, 20 nt, synthetic construct
  source 1..20: mol_type = other RNA
acctacatattttcagattt

SEQ ID NO: 733 - RNA, 20 nt, synthetic construct
  source 1..20: mol_type = other RNA
ttacttggaattagtgctac

SEQ ID NO: 734 - RNA, 20 nt, synthetic construct
  source 1..20: mol_type = other RNA
aattccaagtaagttggtga

SEQ ID NO: 735 - RNA, 20 nt, synthetic construct
  source 1..20: mol_type = other RNA
cacaggaagtacaaacttct

SEQ ID NO: 736 - RNA, 20 nt, synthetic construct
  source 1..20: mol_type = other RNA
tgctgaacagatggaaaatc

SEQ ID NO: 737 - RNA, 20 nt, synthetic construct
  source 1..20: mol_type = other RNA
aattcagctagaagatacat

SEQ ID NO: 738 - RNA, 22 nt, synthetic construct
  source 1..22: mol_type = other RNA
tctacgcagcctgcccttggac

SEQ ID NO: 739 - RNA, 22 nt, synthetic construct
  source 1..22: mol_type = other RNA
gctgggacatgtcccgaggggc

SEQ ID NO: 740 - RNA, 22 nt, synthetic construct
  source 1..22: mol_type = other RNA
tcttggccctgcaacatctgca

SEQ ID NO: 741 - RNA, 22 nt, synthetic construct
  source 1..22: mol_type = other RNA
ccctcatagaggacacatccac

SEQ ID NO: 742 - RNA, 22 nt, synthetic construct
  source 1..22: mol_type = other RNA
tctcattgatacctctcacctc

SEQ ID NO: 743 - RNA, 22 nt, synthetic construct
  source 1..22: mol_type = other RNA
atacctctcacctctgtggtga

SEQ ID NO: 744 - RNA, 22 nt, synthetic construct
  source 1..22: mol_type = other RNA
cttcccctcaccacagaggtga

SEQ ID NO: 745 - RNA, 22 nt, synthetic construct
  source 1..22: mol_type = other RNA
tcagatgactcgtaaagggcaa

SEQ ID NO: 746 - RNA, 22 nt, synthetic construct
  source 1..22: mol_type = other RNA
tgggtttttttctttgcccttt

SEQ ID NO: 747 - RNA, 22 nt, synthetic construct
  source 1..22: mol_type = other RNA
tgaaattttgggtttttttctt

SEQ ID NO: 748 - RNA, 22 nt, synthetic construct
  source 1..22: mol_type = other RNA
tgagacttaaacggaaattttg

SEQ ID NO: 749 - RNA, 22 nt, synthetic construct
  source 1..22: mol_type = other RNA
caaaatttccgtttaagtctca

SEQ ID NO: 750 - RNA, 22 nt, synthetic construct
  source 1..22: mol_type = other RNA
ccgtttaagtctcataatcaag

SEQ ID NO: 751 - RNA, 22 nt, synthetic construct
  source 1..22: mol_type = other RNA
ccaattcctgacattttggcag

SEQ ID NO: 752 - RNA, 22 nt, synthetic construct
  source 1..22: mol_type = other RNA
gaaataaaagagcagctggaga

SEQ ID NO: 753 - RNA, 22 nt, synthetic construct
  source 1..22: mol_type = other RNA
agggaccacagtggaaacaatt

SEQ ID NO: 754 - RNA, 22 nt, synthetic construct
  source 1..22: mol_type = other RNA
tttccactgtggtccctgaatc

SEQ ID NO: 755 - RNA, 22 nt, synthetic construct
  source 1..22: mol_type = other RNA
agctaggaggtgtctcttcaac

SEQ ID NO: 756 - RNA, 22 nt, synthetic construct
  source 1..22: mol_type = other RNA
gaacactgcaaaccaaaaatcg

SEQ ID NO: 757 - RNA, 22 nt, synthetic construct
  source 1..22: mol_type = other RNA
ttggtttgcagtgttctaatgt

SEQ ID NO: 758 - RNA, 22 nt, synthetic construct
  source 1..22: mol_type = other RNA
ctgccagcttgcgatttttggt

SEQ ID NO: 759 - RNA, 22 nt, synthetic construct
  source 1..22: mol_type = other RNA
aagatgaacttcgtgagcacat

SEQ ID NO: 760 - RNA, 22 nt, synthetic construct
  source 1..22: mol_type = other RNA
aaaaactggaacgacgacaggc

SEQ ID NO: 761 - RNA, 22 nt, synthetic construct
  source 1..22: mol_type = other RNA
attgtcaaccgatactggagtc

SEQ ID NO: 762 - RNA, 22 nt, synthetic construct
  source 1..22: mol_type = other RNA
tcaaccgatactggagtcaggt

SEQ ID NO: 763 - RNA, 22 nt, synthetic construct
  source 1..22: mol_type = other RNA
ctatcagagtctggttctggtt

SEQ ID NO: 764 - RNA, 22 nt, synthetic construct
  source 1..22: mol_type = other RNA
atcataaacagtcacaatctgg

SEQ ID NO: 765 - RNA, 22 nt, synthetic construct
  source 1..22: mol_type = other RNA
tgactgtttatgataaattgca

SEQ ID NO: 766 - RNA, 22 nt, synthetic construct
  source 1..22: mol_type = other RNA
caagaaaaagtggagctcttat

SEQ ID NO: 767 - RNA, 22 nt, synthetic construct
  source 1..22: mol_type = other RNA
tcctgtgcgaggaaagagttca

SEQ ID NO: 768 - RNA, 22 nt, synthetic construct
  source 1..22: mol_type = other RNA
ctgtagcctcatattctcctgt

SEQ ID NO: 769 - RNA, 22 nt, synthetic construct
  source 1..22: mol_type = other RNA
acagatcttcttcaggaaaagc

SEQ ID NO: 770 - RNA, 22 nt, synthetic construct
  source 1..22: mol_type = other RNA
ggctgtctccactttactctgc

SEQ ID NO: 771 - RNA, 22 nt, synthetic construct
  source 1..22: mol_type = other RNA
atgacctgcagtgggatattga

SEQ ID NO: 772 - RNA, 22 nt, synthetic construct
  source 1..22: mol_type = other RNA
tgtcaatatcccactgcaggtc

SEQ ID NO: 773 - RNA, 22 nt, synthetic construct
  source 1..22: mol_type = other RNA
acaaaattcgaaagagggaaca

SEQ ID NO: 774 - RNA, 22 nt, synthetic construct
  source 1..22: mol_type = other RNA
gaaagagggaacagcgactcaa

SEQ ID NO: 775 - RNA, 22 nt, synthetic construct
  source 1..22: mol_type = other RNA
ttggtttgcagtgttcgaatgt

SEQ ID NO: 776 - RNA, 22 nt, synthetic construct
  source 1..22: mol_type = other RNA
atcatagacagtcacaatctgg

SEQ ID NO: 777 - RNA, 22 nt, synthetic construct
  source 1..22: mol_type = other RNA
tgactgtctatgataaattgca

SEQ ID NO: 778 - RNA, 22 nt, synthetic construct
  source 1..22: mol_type = other RNA
caagaaaaagtggaactcttat

SEQ ID NO: 779 - RNA, 20 nt, synthetic construct
  source 1..20: mol_type = other RNA
aagcatgtgctccagaggtt

SEQ ID NO: 780 - RNA, 20 nt, synthetic construct
  source 1..20: mol_type = other RNA
gaagcatgtgctccagaggt

SEQ ID NO: 781 - RNA, 20 nt, synthetic construct
  source 1..20: mol_type = other RNA
ttcttacccagggtacaggg

SEQ ID NO: 782 - RNA, 20 nt, synthetic construct
  source 1..20: mol_type = other RNA
cgaccagaagattgtagaat

SEQ ID NO: 783 - RNA, 20 nt, synthetic construct
  source 1..20: mol_type = other RNA
tcgaccagaagattgtagaa

SEQ ID NO: 784 - RNA, 20 nt, synthetic construct
  source 1..20: mol_type = other RNA
aatcccattctacaatcttc

SEQ ID NO: 785 - RNA, 20 nt, synthetic construct
  source 1..20: mol_type = other RNA
tgcaatccattctactccaa

SEQ ID NO: 786 - RNA, 23 nt, synthetic construct
  source 1..23: mol_type = other RNA
cacctacctaagaaccatcctgg

SEQ ID NO: 787 - RNA, 20 nt, synthetic construct
  source 1..20: mol_type = other RNA
actcacgctggatagcctcc

SEQ ID NO: 788 - RNA, 20 nt, synthetic construct
  source 1..20: mol_type = other RNA
cgcgcaggagctcaaggagc

SEQ ID NO: 789 - RNA, 20 nt, synthetic construct
  source 1..20: mol_type = other RNA
cgggtctagggaccaaggcc

SEQ ID NO: 790 - RNA, 20 nt, synthetic construct
  source 1..20: mol_type = other RNA
ccgggtctagggaccaaggc

SEQ ID NO: 791 - RNA, 20 nt, synthetic construct
  source 1..20: mol_type = other RNA
gaagatgcagcagcacgagc

SEQ ID NO: 792 - RNA, 20 nt, synthetic construct
  source 1..20: mol_type = other RNA
gcagcagcacgagcaggccc

SEQ ID NO: 793 - RNA, 20 nt, synthetic construct
  source 1..20: mol_type = other RNA
ggggcagtgccagctggaga

SEQ ID NO: 794 - RNA, 18 nt, synthetic construct
  source 1..18: mol_type = other RNA
ggcagtgccagctggaga

SEQ ID NO: 795 - RNA, 20 nt, synthetic construct
  source 1..20: mol_type = other RNA
cagccaacctcgctgcagat

SEQ ID NO: 796 - RNA, 20 nt, synthetic construct
  source 1..20: mol_type = other RNA
aggagcagcggctgaacttc

SEQ ID NO: 797 - RNA, 20 nt, synthetic construct
  source 1..20: mol_type = other RNA
aaggagcagcggctgaactt

SEQ ID NO: 798 - RNA, 20 nt, synthetic construct
  source 1..20: mol_type = other RNA
gtcccacctctcacgctccg

SEQ ID NO: 799 - RNA, 20 nt, synthetic construct
  source 1..20: mol_type = other RNA
ggcccagcaggcctgcattg

SEQ ID NO: 800 - RNA, 20 nt, synthetic construct
  source 1..20: mol_type = other RNA
cacgtgcttggcctcaatgc

SEQ ID NO: 801 - RNA, 20 nt, synthetic construct
  source 1..20: mol_type = other RNA
tttctcaggtggatgagaag

SEQ ID NO: 802 - RNA, 20 nt, synthetic construct
  source 1..20: mol_type = other RNA
acacgctgcagtgacaagaa

SEQ ID NO: 803 - RNA, 20 nt, synthetic construct
  source 1..20: mol_type = other RNA
cacacgctgcagtgacaaga

SEQ ID NO: 804 - RNA, 20 nt, synthetic construct
  source 1..20: mol_type = other RNA
gggccgaaagtacccggagg

SEQ ID NO: 805 - RNA, 20 nt, synthetic construct
  source 1..20: mol_type = other RNA
cacgatcgcgcggccgtagc

SEQ ID NO: 806 - RNA, 20 nt, synthetic construct
  source 1..20: mol_type = other RNA
tccctagacccggaacccgc

SEQ ID NO: 807 - RNA, 20 nt, synthetic construct
  source 1..20: mol_type = other RNA
ctagacccggaacccgctgg

SEQ ID NO: 808 - RNA, 20 nt, synthetic construct
  source 1..20: mol_type = other RNA
cccagcttacagcctggcca

SEQ ID NO: 809 - RNA, 20 nt, synthetic construct
  source 1..20: mol_type = other RNA
ctcttcacaggacaagtaca

SEQ ID NO: 810 - RNA, 19 nt, synthetic construct
  source 1..19: mol_type = other RNA
gcgcaggagctcaaggagc

SEQ ID NO: 811 - RNA, 20 nt, synthetic construct
  source 1..20: mol_type = other RNA
gacagaccaacatgtctcca

SEQ ID NO: 812 - RNA, 20 nt, synthetic construct
  source 1..20: mol_type = other RNA
ttacctgtatattttatatc

SEQ ID NO: 813 - RNA, 20 nt, synthetic construct
  source 1..20: mol_type = other RNA
tgcccagggagtttgcccgt

SEQ ID NO: 814 - RNA, 20 nt, synthetic construct
  source 1..20: mol_type = other RNA
cttccaacgggcaaactccc

SEQ ID NO: 815 - RNA, 20 nt, synthetic construct
  source 1..20: mol_type = other RNA
ttccaacgggcaaactccct

SEQ ID NO: 816 - RNA, 20 nt, synthetic construct
  source 1..20: mol_type = other RNA
catgagatccagatatcaac

SEQ ID NO: 817 - RNA, 20 nt, synthetic construct
  source 1..20: mol_type = other RNA
ccttcaaggtaggaagccag

SEQ ID NO: 818 - RNA, 20 nt, synthetic construct
  source 1..20: mol_type = other RNA
actctctacctgaattctcc

SEQ ID NO: 819 - RNA, 20 nt, synthetic construct
  source 1..20: mol_type = other RNA
actcatctagtgagagacaa

SEQ ID NO: 820 - RNA, 20 nt, synthetic construct
  source 1..20: mol_type = other RNA
gctcctgcagagtgccacgg

SEQ ID NO: 821 - RNA, 20 nt, synthetic construct
  source 1..20: mol_type = other RNA
cttacctctctctaggcagc

SEQ ID NO: 822 - RNA, 20 nt, synthetic construct
  source 1..20: mol_type = other RNA
accaccagctgcctagagag

SEQ ID NO: 823 - RNA, 20 nt, synthetic construct
  source 1..20: mol_type = other RNA
ctcccaggacaattcagcag

SEQ ID NO: 824 - RNA, 20 nt, synthetic construct
  source 1..20: mol_type = other RNA
tgaattgtcctgggagataa

SEQ ID NO: 825 - RNA, 20 nt, synthetic construct
  source 1..20: mol_type = other RNA
aagccactgctgaattgtcc

SEQ ID NO: 826 - RNA, 20 nt, synthetic construct
  source 1..20: mol_type = other RNA
tatcagaatttaaaacctat

SEQ ID NO: 827 - RNA, 20 nt, synthetic construct
  source 1..20: mol_type = other RNA
caggagctcaaggaatagta

SEQ ID NO: 828 - RNA, 20 nt, synthetic construct
  source 1..20: mol_type = other RNA
gaatcagactcatgccaagc

SEQ ID NO: 829 - RNA, 20 nt, synthetic construct
  source 1..20: mol_type = other RNA
agaatcagactcatgccaag

SEQ ID NO: 830 - RNA, 20 nt, synthetic construct
  source 1..20: mol_type = other RNA
cttctctatcagatgctgtg

SEQ ID NO: 831 - RNA, 20 nt, synthetic construct
  source 1..20: mol_type = other RNA
tatagtggatttatggtctg

SEQ ID NO: 832 - RNA, 20 nt, synthetic construct
  source 1..20: mol_type = other RNA
tacagtcccttcctggaaag

SEQ ID NO: 833 - RNA, 20 nt, synthetic construct
  source 1..20: mol_type = other RNA
acaaggatacagtcccttcc

SEQ ID NO: 834 - RNA, 20 nt, synthetic construct
  source 1..20: mol_type = other RNA
tcagttgacatttggtcagt

SEQ ID NO: 835 - RNA, 20 nt, synthetic construct
  source 1..20: mol_type = other RNA
ataaggatacgatctgtacc

SEQ ID NO: 836 - RNA, 20 nt, synthetic construct
  source 1..20: mol_type = other RNA
tgatattagatattgatcag

SEQ ID NO: 837 - RNA, 20 nt, synthetic construct
  source 1..20: mol_type = other RNA
agaaactgcaaccaacagta

SEQ ID NO: 838 - RNA, 20 nt, synthetic construct
  source 1..20: mol_type = other RNA
tgtttgcagccagtcaggca

SEQ ID NO: 839 - RNA, 20 nt, synthetic construct
  source 1..20: mol_type = other RNA
ctgactggctgcaaacataa

SEQ ID NO: 840 - RNA, 20 nt, synthetic construct
  source 1..20: mol_type = other RNA
cttacagcttctgcttcaga

SEQ ID NO: 841 - RNA, 20 nt, synthetic construct
  source 1..20: mol_type = other RNA
ggtggtggctgaaaaacaca

SEQ ID NO: 842 - RNA, 20 nt, synthetic construct
  source 1..20: mol_type = other RNA
tgacaagcagttagatgaaa

SEQ ID NO: 843 - RNA, 20 nt, synthetic construct
  source 1..20: mol_type = other RNA
ctgacaagcagttagatgaa

SEQ ID NO: 844 - RNA, 20 nt, synthetic construct
  source 1..20: mol_type = other RNA
ttttacagaattgatatata

SEQ ID NO: 845 - RNA, 20 nt, synthetic construct
  source 1..20: mol_type = other RNA
cgggggcagccctctccttt

SEQ ID NO: 846 - RNA, 20 nt, synthetic construct
  source 1..20: mol_type = other RNA
tgtaaccaacctaaaggaga

SEQ ID NO: 847 - RNA, 20 nt, synthetic construct
  source 1..20: mol_type = other RNA
acaggtgcagcagtgatcaa

SEQ ID NO: 848 - RNA, 20 nt, synthetic construct
  source 1..20: mol_type = other RNA
gggtcctgccagtcttgtca

SEQ ID NO: 849 - RNA, 20 nt, synthetic construct
  source 1..20: mol_type = other RNA
ctgccagtcttgtcagggcg

SEQ ID NO: 850 - RNA, 20 nt, synthetic construct
  source 1..20: mol_type = other RNA
gctgtcccagggtgggtaca

SEQ ID NO: 851 - RNA, 20 nt, synthetic construct
  source 1..20: mol_type = other RNA
tcccagggtgggtacatggt

SEQ ID NO: 852 - RNA, 20 nt, synthetic construct
  source 1..20: mol_type = other RNA
gtcatgcagatcattgtgaa

SEQ ID NO: 853 - RNA, 20 nt, synthetic construct
  source 1..20: mol_type = other RNA
ttgtgtctacaggaagagag

SEQ ID NO: 854 - RNA, 20 nt, synthetic construct
  source 1..20: mol_type = other RNA
tgtgtctacaggaagagaga

SEQ ID NO: 855 - RNA, 20 nt, synthetic construct
  source 1..20: mol_type = other RNA
gtgtctacaggaagagagag

SEQ ID NO: 856 - RNA, 20 nt, synthetic construct
  source 1..20: mol_type = other RNA
tactgtaccagacaaactcg

SEQ ID NO: 857 - RNA, 20 nt, synthetic construct
  source 1..20: mol_type = other RNA
ttacaggggcctgaacaaac

SEQ ID NO: 858 - RNA, 20 nt, synthetic construct
  source 1..20: mol_type = other RNA
tacaggggcctgaacaaaca

SEQ ID NO: 859 - RNA, 20 nt, synthetic construct
  source 1..20: mol_type = other RNA
ccagtgccgacgtaagtaag

SEQ ID NO: 860 - RNA, 20 nt, synthetic construct
  source 1..20: mol_type = other RNA
cagtgccgacgtaagtaaga

SEQ ID NO: 861 - RNA, 20 nt, synthetic construct
  source 1..20: mol_type = other RNA
aaatactcaccatggtttct

SEQ ID NO: 862 - RNA, 20 nt, synthetic construct
  source 1..20: mol_type = other RNA
ggaactgaaagaaaggcaga

SEQ ID NO: 863 - RNA, 20 nt, synthetic construct
  source 1..20: mol_type = other RNA
cggcaaggactcaagtgtga

SEQ ID NO: 864 - RNA, 20 nt, synthetic construct
  source 1..20: mol_type = other RNA
tcatagatgccagacaaagg

SEQ ID NO: 865 - RNA, 20 nt, synthetic construct
  source 1..20: mol_type = other RNA
acaggtaggagcatgtgccg

SEQ ID NO: 866 - RNA, 20 nt, synthetic construct
  source 1..20: mol_type = other RNA
actgaacagatcttcagaga

SEQ ID NO: 867 - RNA, 20 nt, synthetic construct
  source 1..20: mol_type = other RNA
ctacctctttttcccggtgt

SEQ ID NO: 868 - RNA, 20 nt, synthetic construct
  source 1..20: mol_type = other RNA
cagagcctcagggcatttcc

SEQ ID NO: 869 - RNA, 20 nt, synthetic construct
  source 1..20: mol_type = other RNA
agagcctcagggcatttcct

SEQ ID NO: 870 - RNA, 20 nt, synthetic construct
  source 1..20: mol_type = other RNA
gcagattaaactaaaaattg

SEQ ID NO: 871 - RNA, 20 nt, synthetic construct
  source 1..20: mol_type = other RNA
caatcaatttttcgcaataa

SEQ ID NO: 872 - RNA, 20 nt, synthetic construct
  source 1..20: mol_type = other RNA
gtacattccagaccaaggta

SEQ ID NO: 873 - RNA, 20 nt, synthetic construct
  source 1..20: mol_type = other RNA
cctcttacgtcgctctggaa

SEQ ID NO: 874 - RNA, 20 nt, synthetic construct
  source 1..20: mol_type = other RNA
acctgggggaaggagaacca

SEQ ID NO: 875 - RNA, 20 nt, synthetic construct
  source 1..20: mol_type = other RNA
ctgcagttccttcattccaa

SEQ ID NO: 876 - RNA, 20 nt, synthetic construct
  source 1..20: mol_type = other RNA
ttacctgtagactattcctt

SEQ ID NO: 877 - RNA, 20 nt, synthetic construct
  source 1..20: mol_type = other RNA
acctctggggcgatgtagtc

SEQ ID NO: 878 - RNA, 20 nt, synthetic construct
  source 1..20: mol_type = other RNA
agcaggccctggccgactgc

SEQ ID NO: 879 - RNA, 20 nt, synthetic construct
  source 1..20: mol_type = other RNA
ggctgtaagctggggaacgg

SEQ ID NO: 880 - RNA, 20 nt, synthetic construct
  source 1..20: mol_type = other RNA
ggagcagcggctgaacttcg

SEQ ID NO: 881 - RNA, 20 nt, synthetic construct
  source 1..20: mol_type = other RNA
cagctccctgggggttgacc

SEQ ID NO: 882 - RNA, 20 nt, synthetic construct
  source 1..20: mol_type = other RNA
cctgggggttgaccaggagc

SEQ ID NO: 883 - RNA, 20 nt, synthetic construct
  source 1..20: mol_type = other RNA
agagtgccagcgaaaccacg

SEQ ID NO: 884 - RNA, 20 nt, synthetic construct
  source 1..20: mol_type = other RNA
gagtgccagcgaaaccacga

SEQ ID NO: 885 - RNA, 20 nt, synthetic construct
  source 1..20: mol_type = other RNA
ttcacaggacaagtacatgg

SEQ ID NO: 886 - RNA, 20 nt, synthetic construct
  source 1..20: mol_type = other RNA
gtctcgcttctgtggcacag

SEQ ID NO: 887 - RNA, 20 nt, synthetic construct
  source 1..20: mol_type = other RNA
gcacctgcaggtgaggcctg

SEQ ID NO: 888 - RNA, 20 nt, synthetic construct
  source 1..20: mol_type = other RNA
ggaacagctcatccccaact

SEQ ID NO: 889 - RNA, 22 nt, synthetic construct
  source 1..22: mol_type = other RNA
ccctgctccttgagctcctgcg

SEQ ID NO: 890 - RNA, 22 nt, synthetic construct
  source 1..22: mol_type = other RNA
caccaaccgggccttgtgctac

SEQ ID NO: 891 - RNA, 22 nt, synthetic construct
  source 1..22: mol_type = other RNA
gcgatggcctcatcatagctct

SEQ ID NO: 892 - RNA, 22 nt, synthetic construct
  source 1..22: mol_type = other RNA
gaagagcgctggggatgtcgtc

SEQ ID NO: 893 - RNA, 22 nt, synthetic construct
  source 1..22: mol_type = other RNA
aggagcggcgcatccaccagga

SEQ ID NO: 894 - RNA, 22 nt, synthetic construct
  source 1..22: mol_type = other RNA
ccgcggagcgtgagaggtggga

SEQ ID NO: 895 - RNA, 22 nt, synthetic construct
  source 1..22: mol_type = other RNA
aggccaagcacgtgagggtgcc

SEQ ID NO: 896 - RNA, 22 nt, synthetic construct
  source 1..22: mol_type = other RNA
tgaccccgtgacccggagcccc

SEQ ID NO: 897 - RNA, 22 nt, synthetic construct
  source 1..22: mol_type = other RNA
acgcattcatctctgagaatgg

SEQ ID NO: 898 - RNA, 22 nt, synthetic construct
  source 1..22: mol_type = other RNA
atctctgagaatggctgggtgg

SEQ ID NO: 899 - RNA, 22 nt, synthetic construct
  source 1..22: mol_type = other RNA
tcagagatgaatgcgtcaataa

SEQ ID NO: 900 - RNA, 22 nt, synthetic construct
  source 1..22: mol_type = other RNA
caccaaccgtgccctgtgctac

SEQ ID NO: 901 - RNA, 22 nt, synthetic construct
  source 1..22: mol_type = other RNA
cagcgcttcttcttcgcgattc

SEQ ID NO: 902 - RNA, 22 nt, synthetic construct
  source 1..22: mol_type = other RNA
aggctaagcatgtgagggtgcc

SEQ ID NO: 903 - RNA, 22 nt, synthetic construct
  source 1..22: mol_type = other RNA
tcagagatgaatgcgtcaatga

SEQ ID NO: 904 - RNA, 22 nt, synthetic construct
  source 1..22: mol_type = other RNA
ccaattcctgacattttggcag

SEQ ID NO: 905 - RNA, 22 nt, synthetic construct
  source 1..22: mol_type = other RNA
gaaataaaagagcagctggaga

SEQ ID NO: 906 - RNA, 22 nt, synthetic construct
  source 1..22: mol_type = other RNA
agggaccacagtggaaacaatt

SEQ ID NO: 907 - RNA, 22 nt, synthetic construct
  source 1..22: mol_type = other RNA
tttccactgtggtccctgaatc

SEQ ID NO: 908 - RNA, 22 nt, synthetic construct
  source 1..22: mol_type = other RNA
agctaggaggtgtctcttcaac

SEQ ID NO: 909 - RNA, 22 nt, synthetic construct
  source 1..22: mol_type = other RNA
gaacactgcaaaccaaaaatcg

SEQ ID NO: 910 - RNA, 22 nt, synthetic construct
  source 1..22: mol_type = other RNA
ttggtttgcagtgttctaatgt

SEQ ID NO: 911 - RNA, 22 nt, synthetic construct
  source 1..22: mol_type = other RNA
ctgccagcttgcgatttttggt

SEQ ID NO: 912 - RNA, 22 nt, synthetic construct
  source 1..22: mol_type = other RNA
aagatgaacttcgtgagcacat

SEQ ID NO: 913 - RNA, 22 nt, synthetic construct
  source 1..22: mol_type = other RNA
aaaaactggaacgacgacaggc

SEQ ID NO: 914 - RNA, 22 nt, synthetic construct
  source 1..22: mol_type = other RNA
attgtcaaccgatactggagtc

SEQ ID NO: 915 - RNA, 22 nt, synthetic construct
  source 1..22: mol_type = other RNA
tcaaccgatactggagtcaggt

SEQ ID NO: 916 - RNA, 22 nt, synthetic construct
  source 1..22: mol_type = other RNA
ctatcagagtctggttctggtt

SEQ ID NO: 917 - RNA, 22 nt, synthetic construct
  source 1..22: mol_type = other RNA
atcataaacagtcacaatctgg

SEQ ID NO: 918 - RNA, 22 nt, synthetic construct
  source 1..22: mol_type = other RNA
tgactgtttatgataaattgca

SEQ ID NO: 919 - RNA, 22 nt, synthetic construct
  source 1..22: mol_type = other RNA
caagaaaaagtggagctcttat

SEQ ID NO: 920 - RNA, 22 nt, synthetic construct
  source 1..22: mol_type = other RNA
tcctgtgcgaggaaagagttca

SEQ ID NO: 921 - RNA, 22 nt, synthetic construct
  source 1..22: mol_type = other RNA
ctgtagcctcatattctcctgt

SEQ ID NO: 922 - RNA, 22 nt, synthetic construct
  source 1..22: mol_type = other RNA
acagatcttcttcaggaaaagc

SEQ ID NO: 923 - RNA, 22 nt, synthetic construct
  source 1..22: mol_type = other RNA
ggctgtctccactttactctgc

SEQ ID NO: 924 - RNA, 22 nt, synthetic construct
  source 1..22: mol_type = other RNA
atgacctgcagtgggatattga

SEQ ID NO: 925 - RNA, 22 nt, synthetic construct
  source 1..22: mol_type = other RNA
tgtcaatatcccactgcaggtc

SEQ ID NO: 926 - RNA, 22 nt, synthetic construct
  source 1..22: mol_type = other RNA
acaaaattcgaaagagggaaca

SEQ ID NO: 927 - RNA, 22 nt, synthetic construct
  source 1..22: mol_type = other RNA
gaaagagggaacagcgactcaa

SEQ ID NO: 928 - RNA, 22 nt, synthetic construct
  source 1..22: mol_type = other RNA
ttggtttgcagtgttcgaatgt

SEQ ID NO: 929 - RNA, 22 nt, synthetic construct
  source 1..22: mol_type = other RNA
atcatagacagtcacaatctgg

SEQ ID NO: 930 - RNA, 22 nt, synthetic construct
  source 1..22: mol_type = other RNA
tgactgtctatgataaattgca

SEQ ID NO: 931 - RNA, 22 nt, synthetic construct
  source 1..22: mol_type = other RNA
caagaaaaagtggaactcttat

SEQ ID NO: 932 - RNA, 20 nt, synthetic construct
  source 1..20: mol_type = other RNA
actcacgctggatagcctcc

SEQ ID NO: 933 - RNA, 20 nt, synthetic construct
  source 1..20: mol_type = other RNA
cacagcccaagatagttaag

SEQ ID NO: 934 - RNA, 20 nt, synthetic construct
  source 1..20: mol_type = other RNA
acagcccaagatagttaagt

SEQ ID NO: 935 - RNA, 20 nt, synthetic construct
  source 1..20: mol_type = other RNA
cagcccaagatagttaagtg

SEQ ID NO: 936 - RNA, 20 nt, synthetic construct
  source 1..20: mol_type = other RNA
ttaccccacttaactatctt

SEQ ID NO: 937 - RNA, 20 nt, synthetic construct
  source 1..20: mol_type = other RNA
cttaccccacttaactatct

SEQ ID NO: 938 - RNA, 20 nt, synthetic construct
  source 1..20: mol_type = other RNA
tcgatctatgaaaaagacag

SEQ ID NO: 939 - RNA, 19 nt, synthetic construct
  source 1..19: mol_type = other RNA
ctcacgctggatagcctcc

SEQ ID NO: 940 - RNA, 18 nt, synthetic construct
  source 1..18: mol_type = other RNA
tcacgctggatagcctcc

SEQ ID NO: 941 - RNA, 20 nt, synthetic construct
  source 1..20: mol_type = other RNA
cgcgagcacagctaaggcca

SEQ ID NO: 942 - RNA, 20 nt, synthetic construct
  source 1..20: mol_type = other RNA
gagtagcgcgagcacagcta

SEQ ID NO: 943 - RNA, 20 nt, synthetic construct
  source 1..20: mol_type = other RNA
gctactctctctttctggcc

SEQ ID NO: 944 - RNA, 20 nt, synthetic construct
  source 1..20: mol_type = other RNA
cgtgagtaaacctgaatctt

SEQ ID NO: 945 - RNA, 20 nt, synthetic construct
  source 1..20: mol_type = other RNA
tttgactttccattctctgc

SEQ ID NO: 946 - RNA, 20 nt, synthetic construct
  source 1..20: mol_type = other RNA
acccagacacatagcaattc

SEQ ID NO: 947 - RNA, 20 nt, synthetic construct
  source 1..20: mol_type = other RNA
aagtcaacttcaatgtcgga

SEQ ID NO: 948 - RNA, 20 nt, synthetic construct
  source 1..20: mol_type = other RNA
cagtaagtcaacttcaatgt

SEQ ID NO: 949 - RNA, 20 nt, synthetic construct
  source 1..20: mol_type = other RNA
gaagttgacttactgaagaa

SEQ ID NO: 950 - RNA, 20 nt, synthetic construct
  source 1..20: mol_type = other RNA
tggagagagaattgaaaaag

SEQ ID NO: 951 - RNA, 20 nt, synthetic construct
  source 1..20: mol_type = other RNA
ttcagacttgtctttcagca

SEQ ID NO: 952 - RNA, 20 nt, synthetic construct
  source 1..20: mol_type = other RNA
acttgtctttcagcaaggac

SEQ ID NO: 953 - RNA, 20 nt, synthetic construct
  source 1..20: mol_type = other RNA
atactcatctttttcagtgg

SEQ ID NO: 954 - RNA, 20 nt, synthetic construct
  source 1..20: mol_type = other RNA
catactcatctttttcagtg

SEQ ID NO: 955 - RNA, 20 nt, synthetic construct
  source 1..20: mol_type = other RNA
gcatactcatctttttcagt

SEQ ID NO: 956 - RNA, 20 nt, synthetic construct
  source 1..20: mol_type = other RNA
ggcatactcatctttttcag

SEQ ID NO: 957 - RNA, 20 nt, synthetic construct
  source 1..20: mol_type = other RNA
agtcacatggttcacacggc

SEQ ID NO: 958 - RNA, 20 nt, synthetic construct
  source 1..20: mol_type = other RNA
acaaagtcacatggttcaca

SEQ ID NO: 959 - RNA, 20 nt, synthetic construct
  source 1..20: mol_type = other RNA
tgggctgtgacaaagtcaca

SEQ ID NO: 960 - RNA, 20 nt, synthetic construct
  source 1..20: mol_type = other RNA
gcaaccatggctcgtcgggc

SEQ ID NO: 961 - RNA, 20 nt, synthetic construct
  source 1..20: mol_type = other RNA
actcaccaaagcagtgcagc

SEQ ID NO: 962 - RNA, 20 nt, synthetic construct
  source 1..20: mol_type = other RNA
ctcaccgctgcttgggatac

SEQ ID NO: 963 - protein, 20 aa, Homo sapiens
METDTLLLWVLLLWVPGSTG

SEQ ID NO: 964 - protein, 761 aa, Homo sapiens
MNWRFVELLYFLFIWGRISVQPSHQEPAGTDQHVSKEFDWLISDRGPFHHSRSYLSFVERHRQGFTTRYKIYREFARWKVRNTAIERRDLVRHPVPLMPEFQRSIRLLGRRPTTQQFIDTIIKKYGTHLLISATLGGEEALTMYMDKSRLDRKSGNATQSVEALHQLASSYFVDRDGTMRRLHEIQISTGAIKVTETRTGPLGCNSYDNLDSVSSVLLQSTESKLHLQGLQIIFPQYLQEKFVQSALSYIMCNGEGEYLCQNSQCRCQCAEEFPQCNCPITDIQIMEYTLANMAKSWAEAYKDLENSDEFKSFMKRLPSNHFLTIGSIHQHWGNDWDLQNRYKLLQSATEAQRQKIQRTARKLFGLSVRCRHNPNHQLPRERTIQQWLARVQSLLYCNENGFWGTFLESQRSCVCHGSTTLCQRPIPCVIGGNNSCAMCSLANISLCGSCNKGYKLYRGRCEPQNVDSERSEQFISFETDLDFQDLELKYLLQKMDSRLYVHTTFISNEIRLDTFFDPRWRKRMSLTLKSNKNRMDFIHMVIGMSMRICQMRNSSLDPMFFVYVNPFSGSHSEGWNMPFGEFGYPRWEKIRLQNSQCYNWTLLLGNRWKTFFETVHIYLRSRTRLPTLLRNETGQGPVDLSDPSKRQFYIKISDVQVFGYSLRFNADLLRSAVQQVNQSYTQGGQFYSSSSVMLLLLDIRDRINRLAPPVAPGKPQLDLFSCMLKHRLKLTNSEIIRVNHALDLYNTEILKQSDQMTAKLC

SEQ ID NO: 965 - DNA, 3171 bp, Homo sapiens
  source 1..3171: mol_type = genomic DNA
attcgccagccgcctcgctcccggaccccacggctgcaaactgatctggcgcgcggggaggaggagagcgcaggcgagcgaacccgcgagagagggagagagcgagcgagcaacagcgagagcgagagcgagagagccgggaggcagagggagtagtgaccgccttccggagccgggattcatgcctgtcctcgggaccagcgaaggggactttacggctgagtatgagccaggctgctaggagccaggtacccccacgcctgcagtccccgcgccgtgcccggaatgcgagctgcacgcagggctctcccaagttcccaccgagccgaataaaaagcgtcctcccgcagctctccgccaaagacggacattgactccaggactccacagaatggagcaagaatgagaggaaaaaggccggcagaaaagcatgaactggaggtttgttgagctcctctacttcctgtttatatggggccgtatctcagtgcagccctcccaccaggaaccagctgggacagaccaacatgtctccaaggaatttgattggctcatttcagacagggggcctttccaccactccaggagctacctatcctttgtggaaagacaccgtcaaggatttacaaccagatataaaatatacagggagtttgcccgttggaaggtgaggaacacagccatcgagaggagagatctggtccgccatccagtgcccctcatgccggagtttcaaaggagcatccgcctgcttggcaggagacctaccactcagcagttcatcgataccatcatcaaaaagtacggcacccacctgctcatctcagccacattgggaggggaggaggctttgaccatgtatatggacaaaagtcgcctcgacaggaagtcagggaatgccactcaaagtgttgaagctctgcaccagctcgcatcatcctactttgttgaccgtgatggtaccatgaggaggcttcatgagatccagatatcaactggagcaatcaaggtcacagagacacgcactgggcctctgggctgtaacagctatgacaatctggactctgtgagttccgtccttctgcaaagcacggagagcaaactgcaccttcaaggtcttcagataatctttcctcagtatctgcaagagaagtttgtccagtcggccttgagctatatcatgtgcaatggggagggggagtacctgtgccagaacagccagtgtcgctgccaatgtgccgaggagtttccgcagtgcaactgccccatcacggacatccagatcatggagtacacgctggccaacatggccaagtcttgggccgaagcttataaggacctggagaattcagatgagtttaaatcatttatgaagcgcctccccagcaaccacttcctgaccatcggaagcatccatcagcactggggcaatgactgggacctgcagaaccgctacaagctcctgcagagtgccacggaggcacagagacaaaagatccaacgcactgcccgcaagcttttcggcctcagtgtacgctgtcgccacaatcccaaccaccagctgcctagagagaggacaattcagcagtggcttgcaagggtccagtcactcctctactgtaatgagaatgggttttggggaaccttcctggagagccagcggagctgcgtgtgccacggcagcaccacgctgtgccagcgccccatcccctgcgtgataggcgggaacaacagctgcgccatgtgcagcctggccaacatctccctctgcggctcctgcaacaagggctacaagctgtatcgaggccgctgtgaaccacagaacgtggactcggagcggagcgagcagttcatcagctttgagactgacctggacttccaggacctggagctgaagtacctgctgcagaagatggactcacgcctctacgtccacaccaccttcatcagcaacgagatccgcctcgacaccttctttgaccctcggtggcgcaagcgcatgtccctcactctcaagagcaacaagaaccgcatggacttcatccacatggtgatcggcatgtccatgcgcatctgccagatgcgcaacagcagcctggaccccatgttctttgtctatgtcaacccctttagcgggagccattcggagggctggaacatgcccttcggggaatttggctacccacgctgggagaagatccgtctccaaaacagccagtgctacaactggactcttttgctgggcaatcggtggaaaacatttttcgagacggtccacatctacctacgtagtcggactcggctacctaccctactgcgaaatgagactggccagggccccgtggacctgtcggatccctccaagaggcagttctacatcaagatctcagacgtgcaggtgtttgggtatagcctgaggttcaacgccgacctcctgcgcagtgcagtgcagcaggtcaaccagtcctacacacagggcggccagttctattcctcttcgtcagtgatgctcctcttgttggatattcgggaccgaattaatcgcctggcccctcctgtggccccggggaaaccccagctggacttgttctcctgtatgctgaaacaccgcctgaaactgaccaacagcgagatcatcagggtgaaccacgccttggacctgtacaacacggagatcctcaaacagtcggaccagatgacagccaaactctgctaacccgggactccttgccatggacttttcctgttgttgtacacacacaacagaacaaaatgaagcaaaacaaaacaaaaaaacccacaaaaatttgtaaaatgtaattaatattcaaagaaaaggaggaaaatcttcatttgttggaaatgaaaacgttctagcaactgtataaaagcgttgggcatgtttgttatttctatactcactctgtcatgaagaagggtctcagccttttgtggagcattgagggagttgcttcttaggcctcaggtgctgtattgggggagaagggagaaagcatatgcaatgaattgtaaagatctctgctgtgcaggtgctaagattaaacactaaaaagaaagagagatatatgtaatgtacaactgacactgccatttttcctttttggaggaaatggacatagataaagaagatatttcttcggttaagattta

SEQ ID NO: 966 - DNA, 32212 bp, Homo sapiens
  source 1..32212: mol_type = genomic DNA
attcgccagccgcctcgctcccggaccccacggctgcaaactgatctggcgcgcggggaggaggagagcgcaggcgagcgaacccgcgagagagggagagagcgagcgagcaacagcgagagcgagagcgagagagccgggaggcagagggagtagtgaccgccttccggagccgggattcatgcctgtcctcgggaccagcgaaggggactttacggctgagtatgagccaggctgctaggagccaggtacccccacgcctgcagtccccgcgccgtgcccggaatgcgagctgcacgcagggctctcccaagttcccaccgagccgaataaaaagcgtcctcccgcagctctccgccaaagacggacattgactccaggtaaggcggcgccgggtgcagcgccccgcagccccgctgcccttggacccggccccgggccgcattcggggcgtccccgcgctcctctgcccctccccctaccggcacccttgtccgctcttcacctggccgccccgccgcctccaagtcttctccagttctagggagggggttcctgtgcctggggctcaaagggctaattgcgggtttgagtgagtggcgtgtgtgtccccgcgcgctcccgacgtgtgcaccatggtgggaacttgatgtggtgctagtgtgtttgcgtgtgcggcgtcgtttgcgtttgatgcgtgtgttcgtggtgtgtgtgtgtgtccgtgtgtgtaagggaggggtgaagagagagaggtcctataacctacttacggcgcgatgtgtgtgtgcatgtttgtacgtatgtgtttgtatgtgtgccctcgtgtgtctttttaattaggtctctccagcttacacggaatgggacccttactataggatcacgtagtcaccgggaaacccgctgtggacttcctcttggggctctgggcttggggtttggggaggattatggggctgtagatggcaccttatttagcccaatgttggtacgcttgaaggaaaattcctccaaacggtggaatcctgctacactgggacccacagcttaatatgaaagagacatggccaacccccgaggcaaatgagacgctgtcactttaaattctacactgggcagactccaagattctgatgggaatttggagacactggatagtgggtgacagagaaagggggaagtcagcggtgggctccttatctggggcttggaaagtctgggatagggatttaccctgcatccccgtttgcaatcaacagagcccctccggcttctgttggttttggggaggatctggcaagtttgcatggatccccctcaggggaaaggagaaagcgtcctcggggacttgctcatccatcacagttgcaaagggtctcagaggaaatttcatctggggcggctgtggatgatatggaaggagatggatggggcactttcctaagacagattcgtctttctttccccatttcaggcggggaagcccccagagagtctctccctaaatatgcctctccatggctcccctggagttagggggatattgagagaaggcagagaggtggagagggagagagagagagcaagagcgagagagagggagacagagagagagagtgtttcagtactgagggagatctacaatttgaaaaggggctgtgagtgtggaacccatgacagaatgtggcagtaattgacttaaactgctgtcggtttgcacctcgcgtctctcacttggctccaaaatactgccaagggcaggggggcggtggaggaatctcagccaggaaggtagtttgggtcaaggccctctttcttctttcctccatctcctgggaggctctttaggtaggtcccttggccaccctggcttggtactgttgggcttgggctctggggccagccattgatttgattcccagctgcctcttaaaggcttgccctactcagcaaaaatgctgagttttactgctgttagcatggcttccagactcggcagctgttactttctcaaggtaagcggcagccgttctgctctcaggcagggaggctaggagaagacaagggctgtgacgctgggacacagcctcttgtctagctcagcacggaggggccgctgaaaagccctcttaggggaaaaaagtagaaatatatttggcctaaaaaatgtacacatatattctaggaagatatatatatatatatatatatcaatcacacacacacacacacacacacatgtgttcatattctggggagagataaaagcaaacatgtatttgtaggaacctgccctagtgggtgggttctacctgcaggcacttgcagacataccattctctgtccagaggctgatacctcaggctgaagccttcacatagccacagagaatctccttcaggaaactcatgtcagggcagagctccctggattatcttgggtagggggtactagggccaaggaggagacccatttttgggaactgcctcattttctctctttcctaattcacagacgatcgaaactggaaggaatattaaagagcagaaaggcaggactctgtggcctaaagagggaatgagaattccccaacattcagtagtgggttagtggcatgcccaggactagaatctaggcttatcaatcagctagatcaataccctttccactcctcccagcaatatacactctaggactgtatattgctcccacccctatcttgccaacctgccaccatgacccctaccaagacaatcgcttgtcttccctcatcaaacttcacattttcagagatgcatttcagggtttttctatctggaaacatggccctgaagagaaaagatccaatgcctcaatcactattcccgaaagacacacacacacacacacacacacacacacacacacacacacacacacacacacacacggtggtggggggaggactgagagagagacagagagagaacatagattccttctccaatgtctttagggaattaccgacaagcaaggacccagtactgagtgtgactggtaggcagaacccagcaaagtgtctggtctgtatctaagatttttattaaggaatgcactggtttccagagagcaaaatgtacacccatctaccagtgcaaatacttcaggcaaattaatttctttatattaattagaatctcacccctagacattaatacatattacaggcacagaagcatatgcaagcacacatgcataggtgtgcttatacacacatgtgcacacaaagatccagaaacctttcctgcttgctacatttccaaaaaagagaacctccacaccaaattgtgttctcccatataaagcatctcccatgtgaagagtaggacccataaactccagggaaggagaaatgtaaagccctgtgaaagagagaccctggagaagtcagaatcgagttcactcaaaagcgtgctcttagacttctagatgcctgtttcggggtgcaggcagatactgaaaaacatgggggttttaggcccatctgcaatagagccttttccatgcaggattttccggggctagatggcactttagctcccagaagggggagctgtgactccatttcaaccaaggagaaacagctcagagatgccaaatcagctcttgggcccccgttgagtttagacgacccagctcaggctgcaatgagtatctttgccgctggtacaggcaagaattgtaaaaacaccctcccctgataggttcgaattcaacatctctttcttagtgcttgcaagagtttatgttatggatcataaagtcctctatttttctgaaaaggtctttgcccaaaggccccttcagttgtgcaaggagacattttttgatttgcaacctgtctcttttcccctcccaattccttagaggaaatcaccagtacattatcacttgaatgggccattaaggttagacataccctacccgtcttttcctgcttttcccttgctgaaatacaaagcttaacaaattggctgctgaactactggtaaccatgttaaagacaagatggaggtcatgtgaagaagacaggtccttaaatgtcattcttcaaataatttttccagttgtgctcccttctgcaaagattatctttattattctttccaccatctcccacattcagccacgacttttaacaaaattccacccatatttcaacatctagctcaaatgacccttccaagaagtcttctcaagatcttattttggaattaatctctttatcacctgatttttctgtaccattttatctgaaactctattttagtttgtgtctctgtttgccctgctttatagcgctgggggtataggtctatcttaccctcttcagtatggtctcaggagcatctttgtattccagggactgacacagagtagttgctttataaatgtttgcccttgcatttcctgttgcatctcaatagcaactgtcatctctctctctgtctctcacactttctagctaacaattgcttcatgttcatttaaagcaatgccgttacggcatttttgcctataccaagaatatggggattccaatgataatatagacagatgaaaattagaccctacctggaagtgaatattgacttcctgtgttccagggtctttagttttgttctctcatgtagtcgttctttccacccagtgggacagatacagccccttttacagaagaggaaagtgaagcccaggttggttagactccttgatcaaggtcacacaaccatcacagctagaatttgaaactgtcttccttcttacgtcatctctgctcttttcactggaccactgagttaatggtaactattatgaatggttggcaacatcgggttgttcaataggtgctaggaatagctgggagttattatgagctctttgaaattgatggtatgaaggtgtcatgagtcactggatcaaagaaaacctctgaaggtttctcaatgaccaaacttttctgttttcaggaatgacgagtcctttttgtaatgccaataatacatgaccattcagtctcagttttagtacttttagtgatagcaagttcattaccgcacaaaccagcctatgtcatatttgaagagctttgttggaatattttcttactttgcccctaaatcatccttctatccatatgtctctgaaatcacacaagtgcaattctcttccagttttcagttcttcgaatattatgaaaacataattatttcacaacagttttctttctgaatagaggggattgtcttcacagccctgtcttctgtagcatctgcttggaggcctcttggcaccctgaatactgtcctagggaaattgtctagtttacctcacttttagggcttcgatgccaccaaaaaaaaaaaaaaaaaaaagggagggatgacctgaaattgagtgaggatttattcaacaaatatttattgggtgcctactgtttgccaaacattgctgtagacgagagctgtcaaatagaactgtctgtgatgatggacatgttttttgtgctgtccaatatggtagccactaaccatgtatgattgctgaacacttgaaatgtggccagtgttgctgatgaactgaatatttaattttatttaacttatattaatttttattttaatttacatagctatatgtggctcatggctactctattgaatagcacaggtctgggctttagaaatgtagcatgtacatggccatggccttgtttgttttcattaagttcacactctagaggagcgagatgaataatcaatgagtaaacaaatagataagcaagataattttatataatattaaatgtcacaccactagtcgtggtaatgtggtagaaaggaatgtggatggtataattttcgattgagtagccaggagaagcctcctctgagaaagtgatgttggaactgaggcttaaatgagaaggaatcagccatgtaattttgtggggaaagagcattagaggcagagagaagaataaaatggagttggccaggcttggtggctcatgcctctaatcaaagcactttaggaggctgaggtgggaggatcgcttgagcccaggtgtttgagaccagcctgggaaacataacaagaccccatttctacaacaataataatcatctttaaaaaaacagctgggcacctgtagtcccagctgctccgtaggccgaggttggagaatcacttgaacctgagaggttgaggctgcagtgatctgtgattgcactactatactacagctgagcaagcagcagagtaagaccctgtttcaaaaaacaaaacaaaaccaaacaagccacggagtcatttcactgggacaagcttaggaagtctaagagatggactacctgccagtgtggctgaagctttcaaattgggaacatgacataaaagggaattaggaaggtaggcaggggcagatcacaatggcctgtacaggagagtgagaagttttgacatcttttccttgacatctctggttggaaggcaggtagtttgaggactaaagagagtttgagaattgacagaaggtcattgtcaagtacttttgatgggtttttattatgtccatttttaatcagtaatttctacaagttttctcattttaatttctactcctactctgaatgccataccctggagatacaacagtgtaaagtgaggaggagaaacaagagtaggggaaatggatagaaaaggaaggagagaatgaatatgtggggataaagtaatttaaatgaagtgttgtgaaaaagaatgaaagctggaagttttcagtttggatcagcaaatatttattgcatatcttgtcgtggaaaggctttggacaaagtgacttggggggtatggtgatgaatcttgctaggtgctggcaatctaatagtaccgatctgcaaatctataaataattatcattcatgatagattgataattgtcacttcagaagttctgtgagaattttgggtaaggggaagtctaaaggaagacacttcagtagtgatagtggtgaggaggatgtcgacagtgaactataaggtctcagagatcacaggcagtatctttttctgtctccattaattcggaatattatacaataagagcacagggactcagggtacctgattccagtcctggcttctatcactatatatctagaccccctcaagaacctatctttatctctccaggcttgccttctgtaaattgagaagggcccagctgtggcttgcttcactgaaggtatattgcctggctttatgaaaatgttgcagtcaggcatggtggctcacgcctgtaatcccagcactttgggagggcggaggggttgggggtgggggggtggtggatcatgaggtcaggagttcgagaccagcctgaccaacatggtgaatccgtgtctctactaaaaatacaaaaatagctgggcatggtggcgtgtgcttgtaatcccagctactcaggaggctgagacaggagaatcgcttgaacccgggaggcagaggttgcagtgagctgagatcgcaccactgcactccagcctgggcgacagagcgagactctgtctccaaaaaaaaaaaaaaaaaaaaaaatgcaaaaactgtagctgggcgtaatggtgcacacctgtagttccagctacctgggaggctgaggtaggaggatcacttgagcctgggaagtagaagttgccgtgagccaagatcatgccactgcactccagcctgggtgacagagtgaggctctgtctgaaaaaaaaacaaaaaaaagaagaagaagaatatgttgcatgacaaagttcttgtaaaagcagagagagacacacacagtagctgtgcttcctcataagatttagatgtcttctaaaaaataaggaaatttaaaagaggtcataccttacagcacagactgtgtttcgagacagtgtggctgagtggtggtgagatagtgattctatgccatggtggcaactcctgatatcaaagtgattaagggttaacatgaaacccactgtcctcatggaacacagcagcccagaaagactgcctagagatccatagacagtccttgctactgagggggcaaaaaagacaattaaggagataatgaggctgagaaaaagtgaaattaattttttttttcatatgagggtgaaggggatctttgtctcctgagggaactatcttttggagattgcaagtggccttaaggagaatagactgaatgagactgggtatgagagagaaagtgaagagtcataaattacccggacttcctgctatccccacacaggaatggagagcctggtgaggacacaaaatatatcattctgaacaaattttgttctcagtttgcagaggttttctcacagggtgcggagttgtataccgggaagttggggccatcttgggatagctaggagactgtattccctcaagggtggcaggtagattgataaggtaattaacaaaagcaacatgcaaccatttttgtgtaaactgcaaaggtcagagcagcagggctcttagcaaatggcctatgtgaacagctagaaccctttgtaagggttaacccagtactggccctgggaggtttctaagatataatttatctagccttgcaaaggtcctacaaatgagccattgggaacctctgtgagaaataatggagcttggggataatggagaacagccgcgtttagccacgttacagattacaagctgattcagttggaggaaaggcagacatccaggatatgattgctttttggggaaaaagtggtgaattctcaagtctccattctaagatttagcaatctgcaaaagtagatgaaactctagtaggctgtggaattcctagagtccccaggagctccaagataaacctagaagagcaaacagagagctgtgaaagagacaactgccttccgtaagtacgtacgtttccctttacatggtagtggataagccagatttcttatggaatttgatgggttctgagtttacaggcgcatgataaaggaaggacctacaggaagcctgggctgggacgacaaaaacatctgcacaagcataggggccattagaaaagaaaatcagcactttggtatgcttaggaaagattgaaaaatagattacctggcaagggttggtaatacagttttgctgctgggacacattttggagacacagttcttttaggtgaagtggtccacatcaaatgctattgccagagttagccgaggctagggaggactgagagagcttataaagaattttattctgaatgtatatcaataggacaacaacattgaaagtccagtgaagccttgcaagtgattcctgaaaatattaccaagtcagctccagtttttgcttaccgctctctcttccctgacagtgggaatgatacatgtaggcagagcatggactggaatttgaaggggctctggaaggatcttcatccataacatttagagatggctgaaatgtcactgccctaaagccgttcttggagtggaaaagtggatgtgccaagcatgtgacatattctttgtgttgcaatggatatttgatgtagatatcctactgaatattctcaacaagctcatgcataggtagtattgtgccccattctagagaggttgaaactgagctcagagcagtaatgccacttgaccaaggccatatactgagtcaattgtgttttgttgtggatttgaatctacttctttctgacttgaaagtacagaggttgaaagcttgggtctgctggagtttgaatacctgctctgccacttactagctatttgatgtggaacacattacctgatgtttctgtgccagttttcttatctgtaaaatgagtactgtaagaatagtaactccaggtttggcatggtggctcacacctgcaatcccagcactttgggaggctgaggcaggaagatcgcttgaggccggctgtttgagaccagcctgggcaatatttagcaagatcctgtctctacaaaaaatttaaaaaataattagccagatgtggtggcatatgcctgtagtcctggctacttcgggggtgctgaggcaggaggattatgtgggccaaggtgttcaaagttgcagtgagctgtgatcatgccactgcaattcagcgtgggtaacagagtcagattctatctcaaaaataacaacaataataatagtaacttcatagaggcatgtgtgtatttaattagtttatatgacaggtgcctcagacagtgcctggcagatcatcaacactatataaacattaactgttactgccttttatgatttccaccccctcttatattagattagccattgctcatactctcaggtatgtgctcaaactggaaataacatgtagaaaaaaagtattattaggttcaaggcactgccttccaaatgaatgtgctcaattatttctactaacctccccaccatgtggcagtgggataacagtgattagaggagagagtgagaaagtagaataaggcgtgggagaacgcaaaatgatagaggcagatttttaaattctctataacaggccagaaatgagatatagatgtaaagaccagatatagacataggatcacctaccataaaggcagaaagttatcttcaacacaatccagctgaaattccaacctctctctctctctttttttttcttggagatggagtctcgctctgtcgcccacgctggagtgcagtggtgtgatcccagctcactgcaacctccgccttccggattcaagtgattctcctgcctcagcctcctgagtagctgggactacaggcacacgccgccatgcccggctaattttttatattttggtagatacggggtttcactgtgttgctgaggctggtctagaactcctgacctcaggtgatctgcccacctcagcctcccaaagtgctgggattacaggcatgagccactatgcctggactctcctttttttttttttttttttaatacatataaactctttttaagatcaatccgtatctgagttggttttagaaccttcgccttgtgcagcccatctcacttttgatttggttttctaatgtataagacagggtattcatcaggtgcatatgggaaagtagatgattgacagcatgatggatgctcttgtgtgaactgtgtttatcaacctccttcttatgattcccctcttcatccttattctcatttattttattaggtgtttgcatgttgtcacatgttatatctcatttaacctttacagtaacactctgaaattgtaactattctccccattttccagatgagaacattgtgggtcagaggtaaaaggatttgccccaagatatacaataagtgagagcatcaggttctaagcccagtgtatgttatcagcaagtgtatgttctgtatgtatgtatgttctgtccttgaattgccattcctttatacaccagctgaaggcattgtggattagcagcttggtggtgtcccaaagacaaggttgaatactgctgcctgatctctattgtcttgggataggttagtcattgcaaatcttcatgcaatgaagtctgtcatgcagactctgccctcaatcctgatcctgtacatgcctaaatgagaaaggcatccatctttcatattccaggagatgttataaatggtgccactggaaggagctttcttaaatctccttaacaatctgcgttttgctttctctctttatctgtcagcatcatgaatatcttccactcttctagtgctttctggctgccaacttcatagcctcttaaaatagtaatttaacttcacagtgcctcggcaggaaatcttagcttagcatgcttatctgcacccttagttcaaatgctgctgacaccaggatcagtagttatagaatgagctgctttctaactctgggccacagccaagagccagaatcttattcttcctgggagtagaaccaccaaagccaccagtcataacagtaacactttttcaagccagcaaatagcagggttgagttagcccaaattgtgacagccagatgttgcaatctctctgtctgtctctgtttttctctctgcttcacttatacacacacacacacatgcacgtgcacacgtgcatgtataaagaaaggaatattgaacatggttgagaacaggtagaagagcagctgatataccagaaaatgtccaaagcagatttcttcttctctagtaaaagaacatgagcccagatatggtattaagatcacctactatcagaagataatcttggggtgggacttctatctaaaaatggaatgaggaacacatgtgaccaataaatgtaaaaaatacaggatattttgttctccagtaatcaaataaatgaaaatagcaatgcgatgctatcatcaaaatggctttttaatttaatggcagcatccagttttggcaacaatgcaaggaaaagaacactgtcacacagcattggtggaaatctatattgagtatacccttttatgaaatatgactttcattctgtcataaacaaacttttgttttttttttttttgagacggagcctcactctgttgcccaggctggagtgcaatggtgcgatctcggtttactgcaacctccgcctcccaggttcaagcgattctattgcctcagcctcctgagtagctgggattacaggcacgcaccaccatgcccagccaatttttgtatttttagtagagatgaggttttcaccatgctgcccaggctgggtcttgaactcctgacctcaggtgatccacccatctcggcctcccaaagtgctaggattacaggcgtgaaccactgtgcccagctaaacaaacattgtttattgagcactcatcctttgccagatgcttttttatgagctatgaatacagcagggaatcaaactgaccaagttcttaccaccatagagctgacatttaattgagaagataatttataaataaagaagtaaacatatagtgtattggagagcaaagtgtgatagagaaaaaggagataatgcatgtggaccagatggcctggtgagagaggacttggtattttatataggtgggtaggaaaagccctcactgggatggtgacattggagcagagatctgtaggaagtcagggatagagtcaggtggatatctgggggaagagcattccaggtggagacagcaagcataacatttttgagatgggactgtcagtgtatacagaaaccagtgtgactgaagtggaataaccaataggaagtagggggagaaagaagagatacattattgtgaaagcaggggttagatctctatctcgatctttataatttctatctctatttctgtctcttatctttatctctataccaaatttttaaaaagaaaagaaggtgcaaatgcttttgaggaaaaaaaaagtgtccccttctaagaagtcagctaattacatgtgtacaagtctgtgaagaagaaatgttatcagagtgtttggagaaaaaaggaaaacaaaacagagcatagaatggaatcctctgtggtccttaagaatgatattaggaaagcacatttgtacattagaaggtgggatgaagatagggtgtatctttttttttttttttttgagacggagtcttgctctgtcgcccaggctggagtgcagtggtgcgatctcagctcactgcaagctccgcctcccaggttcacaccattctcctgcctcagcttcccgagtagctgggactacaggcacccaccaccacgcccggctaatttttttgtgtttttattagagatggggttttaccatgttagccaggatggtctcaatctcctgaccttgtgattcgcccaccttggcctcccaaagtgctgggattacaggcgtgagccaccgtgcccggccgggtgtatcatttttaaacagagctgacaacaacagtaccttccttctagttatgctgttgagaatgaatgtcgcatgtacaaagcacttcgcaacatgcctcacatatagtaagtactcaataaatggcacttatgacatttatcaacatcaaatttttgtgaattaccaattttaaaaagcataaggttcaaaatatcatatagagcatgattattttatatgatgtatcctagtatttgaatagtcatctttgggtgacgggttgtagtgaatttcattctttgattcttacctgtattttctaatatttctttaatgaatgtgatttgcttgtgtagtcagcattttaattagtgggatatgggggatcagtgagcaatttgtcgtaggaacaggagtcaaagcaggggagaaagctttagttctgttttctcaatttctaagtcattcatccaccttaaatcaaatttaaatagacttagtttttttctctgttttgctcaatcttggcctgaacaataatgcctataaaaactggaaatttgtcaagtgatttatacttacgttttttctctgagacagggtctcactctgttgcccatgctggagtgcagtgatatgatcatagttcactgtagccttggattcctgggctcaagcaatcttcctgcttcagcctcttatgtagctgtgactacaggcacatgccaccacacctggcaagtttttatttttattttttttttttagagacggggttcttgctatgttgcccaggctggtcttgaactgctggccttaagcgatcctcctgccttgacctcccaaagtgctgggattacaggtgtgagccatcatggctggcctgatgtatacattccctggaccctcacatcccctgagttttctcacttgtaaaatgaagcctgagattcgatggagattctaagaaaaccactgaagcccaccacaaaagcagggagaggttgagcaggtgagcctggatctgagatcatccccaccttgccacccacatcagagcagctccatgttttccacttgcttcattacatttttgtgtaagctttgaataaggggttcccaggctttaaaacatgacttgaaatcattagtttacactttaaatcatctctaaaagtggatttatgagtgatggattttgtcctattttttcatttaatttttactaatattctgtatagcatactttaggaaactctacactagacaaatgtattttccataaaaaccagaatattaggcatgtcaaaaaatgtatacaagcaattctgatgatccatattatttcagatatgatgatgatatttttaaaaaattaccaaagaataataagaagggaagtttcccaatggtaagaaggggtgtttaatgtaagtttcacctctttctctctccctcattctctccctagtgggtcaagggagagggaggggttaaagatgacttcctccaagattgttccagatctattgaggcctgctctgtctaaatagtgcttccaggaacagcagggtctcaattatctcaccgtgggctgtgaaattgtaaaaaaaaaaaaaaaaaaaaaaaaaaaaaaaaagtgctcaaaacaaaattaagtttaatttgctttaattgaaaaataaacacatgccatgtacagcactctcaataggaggagaaagggctagaaaatgaaatgaacagttgggtgtagaaggccctcaattattggatactctgaaatgggaactggtattgattgagaaaataaattcagagttaaattcagggacagaaaatgtgggcctcctctctaagcaacagttttcttaatttctcatgatgatatttttattattattaagaacataaagcagacgtggaataaaggaaggaactctaacatgagaccacagagttggagtttcactctaacactggcgttatgtgatctttggtaagtgtcatttctcagcctcaggttcctcatctgtaaaatggggataatcattcatatatcactggattcctatgaggattgaatagttaatatacatggaagttctaaagtactgttaagggatgatgggagaaggataaagaggaaaaggagggaaaggtggaggaaggttagaaggaggcaatgaaaaataaggaagaggaagagcaccacaatgatttgatcagctcattcaagctcaatatttattgagagtcttctatgttccaggccttgtgctagatgctgggaataaaaggaaaagaaatagctgaggcttgcctcggtggtaccgaaattctatcaatagatgttctgaatctttaggccataaaatgaagtcaaggaggagattggagctatgggaggtgtttgaaaagccttgaggcatgctttaagagctcttctttttagtggccattctttctttgcatgctgactctaccttccccattcaaatacagacactttggccctgacttaggctcctactttctcaaagaaaagggtctggaaacctcatttgtatgaagttgatagtgatttaagattgtaaattacagtgtcagagtcatactgttggcatctttgaatcataagttgcaggatttcataatttatcaaatgttggaatcagagaatcttagaacaataaaaattcagtcagaatagactcatagagtataatatttatggaatataaaaattaaatctgaccaggcatggtggctcacgcctgtaatcccagcactggggaagtcaaggtgggtggatcacctgaggtcaggagttcgagatcagcctggccaacatggtgaaaccccatctttactaaaaatacaaaaatcagctgggtgtggtggtgcacatctgtaattccagctactcaggaagctgaggcaggaggttcagtgagctgagatcgcaccactgcactccagcctgggtgacaaagtgagactttatctcaaaaaagaaaaaaagaaaatcacatcttagaaatcatagaatcatgaaatgaaatgagagccttttaaaagacagcagcattttgtggttatctggcccaccatctttcccaattcaaaaaaaatacatatgtagcactaaaatataaatattcttgattataattatgtaggaaaaatgtctatgaaggaaacgtcatgcttaataacactgtgttaatcatactgaccaaaggcactgatagtaaagacagatggagcttctgcacattataaaagttcttcttgggatggttgctgactttacggatacctaagacaaacatttatcttgagtaatagaaaacttgaagcaggctgggtgtggtggctcacacctgtaatcccagaactttcggaggctgaggcagaaggatcatctgaggtcgggagttcgagaccagcctggccaacatggtgaaaccccacctctactaaaaattagctgggcatggtggtggatgcctgtaatcccagctactcaggaggctgaggcttgaacccaggaggcggaggtttcagtgagccaagattatgtcactgcactccagcctagttgatgaagtgagactctgtcccaaaaataaaaaaaaaataaaaaaataaaaagagaaaaaagcaaagaaaacttgaagcagaataggaataatgactttgctcattgactttcctactataattattcatgttggcccaacttattcatgatgtcatgtcagaaaataagcccctaaacatcggtctttcctaggactgtaagcttcaagagggtacaagtgatatgtgactatctggtttctatggggtctgtagaaaagtgctttgcattgttaggtgctttgggagttcagtcctaactttccctcagcgcttcctcttgtatacacatgatgaactattgttgatctccatccttgtgcttcctttgaagcattggcttgtattgccaagactttttttttttcaaacctggcatccatttcatgtgtggtagttgtttgcttcgccttccacgttcttctacaggacctcagatccaatggcataacttgatagatatgggaagaaccttgcttaaagaagtgtttagagtgagtagagctcttcatttcgtatcagggcagctctgtgtgtgagtgtgtatgcaagtgtgtgtgctgctcacataaaatgtaagcttggaagtttttcacgtgcaaatgagtttgaatgtgttacatggatttctaagtgcattaataagtggataaacttgtgtggatataatgtgtttatgaatagatgagaatacatggacacagggaggggaacatcacatacctgggcctgtcgggggttggggggcaagacaagggagaacattaggacaaatacctaatacatgtggggcttaaaacatagatgacgggttgatagatacacacaaactaccatggcatatgtatacctatgtaacaaacctgcacattctgcacatgtatcccagaacttgaagtaaaaaaaaaaaaaaagacataaatacacttgtggtttttgacatacatttgttgaacatctactatgtttctgataatgaagcaggtacatttttatatatatttgatttcacaaccatgaagcaggtattacagtttttattttgaagatgtgtcaactaacactgttagaattgagccggccagggctagtacttgaaatggagtttatgtgttttgaatgtgctgatgtgtgagagtagggatgtgtgtgtgcacatgttcatggacgtgcgagtgtgtgtgcaatctttttttttaatgtgtatttcttaatacatgtggagagatatatctttatattatatgaatgtgcatgtcataaatatatatgcaccagctgatacctgagtcatccagcaaagcaaacccatgtggctgatcttagggaccaggggaatgtgaactgtatgagctgtaggagaaagcacccaagagatagagagcggcaacttagtataaattcatccgtgttactgacgtggctgtgtgttttccagtaattgtataccataagttattaaccctcaagagcttgttttaaaagtaagtacatctaggccctgtccagacccaataagtcagattttctcgggtagggctctgacttgagtgttttgttaaagttcccctgttctaaaaagcatctcagactaagatcctctgctctggcagccttcatccagagcagttgttcccagatgctggtgtgtgtccccaccacacgttggatgttgattgacaggcaggattccagccttcaaagtcctggaaccttactcactaagtccatggtcaggatccaaaatcatctaaagagcacccaaacatgtccgttttgagtgatcctgaaactgcagtttgtgaactgtgcatctagatcttaaagcagacttcaaagatggaagaagagggagaaaaaggaagcaaatgctggagagtgttcatgatacagaagcttaagaaggagaaagaaatgaggaactgagagtagagaaatacgaaggaagaggaaaataattttctcagtgtcacataggaacagagctcggatctgaatccaggttttcctgcctacgtgttttcccctctgcacttcccctccacagatccccctgctgggggcttttcgctgactgcaacccgaacccacataaatcttaagcagtctgacacccagcgaagcacaaaaacattccacattcactgcactgatgctttgaggggctgaaatagaactttgaaattctccttcacttttaattaaaaaaagatttaggccaaccccgggttcccagttctatttaactgagacggcttttaaccgttgctgtatttttattgttacaagtgtaccgcaccaatccatcttccttgtaacgcatctcggtttctgctccatctgctgaagagaaaacatttgcagaaatctctcggcttctctccaagagctgaaacttaagttgtagcaaggaatgcagtgcagggaatggggctggccattggtgaaatcaggagactggtaaaatctgtttccagtatgtttttgataattgtttcttcacactaacagttgtcccatataagcagccagtgcaattgtgttcccctgtgtgtatctaggaggactccaggcaccacacattttggtttttacactctcccttacaatggaaccaacaattttgttcttaatttttgcctgtcccctatccttagcaagctcttacgcgggggtttttctaataaactgtccttagttttaattcataaggactatatttttgtgtgagaggggccttggaagacttgggttcaagtcttttctttgccatgtttcaacctggcaaataactcaaactctctgagcctggatttcctgtaaaagccccaggaggttgtcaggatcaaatggtttaattgaagcacaaatgctttgcaaattgtgaaatgctacatttacaccacacatacccggccagagcattcacttgtcagtgatttgatttgtttgcttatttatttattaatgggtcatttgctggatgaatgctatgcaccaggcctggcttcactgtgcgtgataccgaaatgaataaggcaaagtccaaatcctccaaaagcccacacatatgacaccatagtaagtgttgacctagggtcataaataggctgttgtttcctcttcctatgggatcaggagattcttcaaagagagaatgaccttgaagtgaatattaaagaataaaagtttcccaaatcgagaacagtgaccaagccaaatgctgacaaaaataagaagcaacagcaattctcactgattgctagtggggatgcaaaatggtacagcgacagctacaaaactaaacatactcttaccatagaatccagcaatcagggtccttgacatttaccaaagatgttgaaaactgatgtccacacaaatacctgcacacagatgtttatagcagctttattcataattgccaaaactcggaagcaactaagatatccttcaataggtaaactgataaactgtgatatctagacaaggggatattattcagagctaagaagaaatgagctatcaagccatgagaaaacatggaggaaacttaaatgcatattgctaagtgaaagaagtaaatctgaaaaggatgtatattgtataattccaacatatgctagaaaaggcaaaactatggagatactgataagatcagtagttatcaagggagaatggggcaggggagataagtagatggaacatggaggatttttagggtggtgtatgtattctgtatgatgctataatggtaaatacatgtcattatccatttgtccaaacccataaaatgtacaacacaaagggtgacccctaatgtaaactatggactttgggtgataatgatacatcggtgtaggttcatggattgtagtaaatgtacatttctaatagggcatgttgataatgggggatgctatgcatatgactggataaatgtatatgggatagctctgtgttttattttgctgtgaaccaaaaagtgtccttaaaaatgtcttaaaaaaaataaaaggtttattaggtttgggaatggtaatggggtcgggagagcattataggcagaaggaacagcttgggagaaagtggccatggggtaaaacagattggggcttgcagaaaatatttgcagggaaactaggaagcagaggcagagatgttgggaagcgggtggacagtgagatgtggggaataacagggtgaagtaacaacagataattgtttacatttagaggtgggaggaagccattgatcaaggtgaaatcaaggtttgattgatttcaataataataataatgtccaataataataatgatagctaccttttaaccaaacagtatgtgcaggacacggtgttcatggtttatattcatcatttcattgaaagcacaaagaaagtaagatcctgtgaaagaggtatgatttaactggtgtgggaactgaggttaaaagggtttctgtgacttgcccgcatagacagtgggccccatagcttgagccaaaggcaagtctgtctgcttaaagtctctgctcttaatctcctcattgcccacattggcatttcaggaatacctggatagcttggagaaggagctagtaaagggaggggctgtgcaagtagcagattgcaattattcttgagggtaaaaaaatctcttggaactgtaaaaacggagtcactctgctggcaggattgcaggcattaattccaagccttttcaaggtgattgatattttggggcaagagggagagcttccaagaagtaagtctatgtgggcaactttctgctgtacctgaagaagaggtaggaatctgtgaaggagttgggccttctggctcttgctagttaacaacctccacattgggtctagtgaactctgtagagacacctaacatgtccgattaatgtcatggaagctgcctttcttgacaatccaccacaggcagaaccccaacgtgaaaaggccataaaacaacccaaagcctttactttattccttttctaagtatgttttggtagcattttaagttccttgaaggaaacaccatagaatcacaagctctgtggtctgaaatgcctttgagattttcattctctttcttaattttgtgaatgtcactgtcagaacccctcaattctatcttgcgattctattgttacaatctctgcctgttggaattgtttttttttcatgtacgtacctttctgtgtcatccacctttggccaactctggcaggctgatggctcttaagtgctggtctaaaatttggtgtcaaaatttgaagagtaatattttattttgatgttatgccctgactgtttcttgttggtggttaaaatgtcctttcccttacaaaattctggtaacggtgattgcagtgtctgttttgttaaataacctttcctagaactagaaaatgttgataatttcacattggtccaaaaaattggttttacaaatttgatttggccatggggtcaaaaaggctgatgttgatgttatggatcaaacagagtaagtctgtttcatatttcacatttgagtacagactactattatatctttaatttattatcttctgtaatatcttggtaatgtcttgcccatagtaggtcatcattaaatatgtatgtaaatgagtctccaggcaatcaaaaacatagagtaccttttttatattctggcctgtttgatgcactgtttgatgcatgcacttaataagtacatttaatgtgatataaatcctaccgtcaaggcatcagagttgagtatgctttgtggttaagaggtcaggttctggaactagactgcctgggtgtgagctcaggcttcccctctaactagctgtgcaatctcaaacaggtcacttagcaatatagtgcctcatttaccctgtctgtaaagtaggtgtgattaaaaaaacaaaacaaaacaaaaaaaaccacctcatagagttgctgtgaatttaaagatcttagagcagtgcttgacacatggtatgtgctcagtggttgttaactctcatcatcaaagcttacacatcggaaatggtgtagtagggagtccacgttgatttggttcagaagacttgggtgcaagtttctgctctgctacttactagttgagtaaacttggaagagtcacttaaccttctagtataaacctaattagaactaatggtacaactttagagatggctaacgtgcatgggatggagaagttgaaaaagctgccatgaaatggaaccttaaaggatgagtagggtattgctatgaaacagacagtaagatggggtagcaaagaggtgaaatcacctgtggaaaatatttggagccacttattttcctctttctgaaatgttctttgaggaattagtgagatcaatcatttcttttgggatggaagagattgaaactattacagctaatagagcattcttttccatagagacatccagaaatagaatttttttttctcccaagaaatttgttaccatgatgaagaccttcttatcacaagggagttgatgaaaagatgaaactaaagtctaacatggagttaagagaacaaaaattgttagaatgatgttgttcagggtctggaattgttatcaaatatacttaagacaggatcaatctggaaagtgtttctacacaacatgggtggaatcaaatgtgtatgtgaatattcaatgagacaggggttttgggtgcttccggctctctcgatttcacttgttcccagagattaggctgccatctggatgctacctgcattcaagatgttacatgcattcttgctgattttcagaagtttgtcaacaatgtcttttatttgtcttcgtgcagagaagaaataagtactggagcattaaagttatgggagagaactgatcatgttgggaacagggcaagaagtctggggctctatttttttatgtgcttatggggtttttgtaagccactgcaggggctacgttaaaaaagatatcaggcatgagcagaggatggtcaatggataatctgattgagtacttctttcagtggaacaaagctatttgcatatttaggtggtggctgtggcatttgagattgaatgtgtggtgtcagaaactgggaagtggaggtaggttcataacctcagcactgggtatcaggtaagcattttaactagagcatcttggaaatccatccatccacccacattttcatctgttcatgcagtgaacttgtatggaagggctgttccttgtactagaggctgtggttaaaatgagaaagtagatctgttcctgctccagaggagtttaatcagttgataaatgtgttgtccacctattgtgttctaaattctggtaacataaaagtgagcaagacagtatgacctttacttttaaggagcttacagtgcaggagaaagagtaatattagccaaactgaatatagcatgagagtgctagactatgtgtgtgtgtttatacatatgtatttatatgtattttccaaaataataataatgtatatttattgagcatttaccactgcaataaaacattttatatgcactgtcccaaataattctccctgctgccttctgaagtaggtagcatgtagttattatccagattttaccaatcaagaaacagattaagagatgttaaaccaattacttagggaaacaaaaagaatcacagcagagtgggaaacagactgagctcctctgactcccgcttcctcccctgagcttctctccatctgtaccatctccccaacatgctgtaggggctctggaggaaggagcaactaaaagggttgtgattgaggatggggaagcgattgagacagaggagggaaaggtgtagattgggtatattaggtctagtaagagaacattaggaggacatgttggggaagagcatttcaggccttgagaacaacatatgtaaacacgtggaggtctgaacaatcatatattgttgagtggcgcaatgaaatctgagtaggtgggttggggtcaaccaaggagttgaggtgggagagggacattatacattatacttcctctgtatagcacagcctcaggcagatagtgcatctcaaatttcagtatctgtcaaggatcacttacttattggggactgagtgagggaggaatgatttactgacctgattaggaaacaccctacagagatggagataaagaatgaggaagaaggtattaaatgtagaaagatgggcttctagatacaagaactcctttgggaggcaggaatggctttcaaacagggtattggtgccgtgcaggaggagcaaacacgttgaagaagccagattcataaagtgaaatgtaagtgtagtgaaagtagtaaattcaagaggtgagcgggggagaagtgttgcatggtgccaggcggggaatggagcagttgttaagttcaaggtttatgacttgaagaacgtgacccatataacccgctttctcttactgatgtgtttttaatcggttgttcttctaaaattcacccttcactgactccatatctcattccccgtaggcagtgcggagcaatctgtttgcatctgcactttatacagctgtgggtccttctcccgtcacacctggtgggtcacatcttggacacagcacagcagccaaagtaccattctgctgaatgacctggaggaagctcagcttgacactatgttctaataataatggaagcattatagtgcatgcttcctatgttgcaggcactctgctaacggctttacatgtgttacttgatttgacccaggcatccgcccaatgtattatactcatctctattttataaatctataaactgaggcaaagagaaataaagcaacttgccaaggttgaacagttctttaatattataatagaacacctaggatttgaactgggggatgcctcagttccagagcctgtgcttaacttctctagcatattgcttgcttgatgctctgcatggattttccagcacaagtgtaaggacagtttggggcagttttgaaatagtaattatgtcttaagaacagggatgaaagtaatatctggccatcacaaatgccattgagttgattttgctcacaaatcgcctctcattcacggggtagtcttacaggtcttatatatccaagaccaggcatacggtgtctagaggtctgccaggtgatgatgcaaatgcttgaaggctcccattttgtggagacataaatggaggcttaggcagatgaggtaatagtcagaaggtaattgttgtatttggcaggtttgggatgaaaactcaggctaatctggctcaaaatttcttgttcttatatgacactttttgcaggccatttcccttctttgtgtctctgtttctttgtctgtgaaacaaaggaattggattagatcaatgtttcggaaatgttagtctttcaggcaccactttaacagtttctattgtcttttcaatccatctgcactacttaatatttctctttgaatcagtccacttcttaaattcacatatttccataggaaatttcatatcattacaactgaaaaaagtattatttacactacatagagggtaactgtatgagtaaatatagtgaaaaccaaaaaacaatacaaccatttttgtttatattctagcatgcatatttggctatattcttgcctatccaagtctctgatctttataactgacttctttgtgttaaaaaataatacaggctgggtgcggtggctcatgcctgtaatcccagcactttgggtgaccgaggggggcagatcacctgaggtcaggagttcgagagcagcctggccaacatggcaaaaccccgtctctactaaagatacaaaaaaaaattagctgagtgtggtggcgtgtgcctatagtcccagctacttgggaggctgagtcagtagaatcgcttgaacctgggaggcagaggttgcagtgagccgagatcacgccactgcactccaacatacgtgatagagtgagactccgtctcaataataataataataatacagatgctcttggacttataatggcgttacttaccaataaacctatcataagccaaaaatgcattcaatacacctaatctaccaaacatcgtagtttagcctagcctaccttcaacatgcttagaacacttacctttgcctacagttgggcaaaatcatctggcatcaccgcacactgtagagtgtcagttgtttattctcataaaatcgtggctgattgggagctgcggctcactgctgctgttgctgggtgttgcaggagagtgtcctgctttctactgaatgtgtatcctttacacaccatcctaaactctcaaagtcaaaccattgtaagttggggatcatccgtatttacaaatgttagagaaaagctcaagacatcgtgacacccaaatgaacatttttccttgatataatcaggattaagagagaactggaaagggatttttctttctcattatgtgggttaaagttacgttatgaaaaatcgagtctccatttaaagccatgcctgctgtggccagtgtaggcagctgtcatttttctgaaatgctggatgtggggatctgtggtgtcttcccaacttttgcattccttaactttaataatcctttaggggcctccatgtacttagagatccagtttgacagtagtagacttgttgagagatgaagtgaaaggcatgagtctagactgtgatatggaagaaggaagtccaaagagagccgttgctgtgcttggctatcttaacccttagaagagagccagggattggagctgataaaatacccagtgctggacatttgtgtccagggtcatgtctccctcttcgagccttttcattcttatccttttgctgttaatgttcactagctccctactctgtggaccttcatacgattcttacctacttgcccctcctttgttctcttaaggactgatacatttaaaaagctgtgtctaaggaagatttgccttgtgacagttctttaggaggaatgaacatgaatcacaagtttactctccccatcataggttgggcatttggcattttttatttctcgtctcccaacaactcaatgacgtaaaaatgagttagggtcttactttacacatcagaaaatgaggtttggagagtatcagtgactcaattgagtcctacgacttctgagccctatatagaatgggattgtctccaaatcctgtaccctttttcagcagttatgatacattgaagattagctggactggggaagaggaggttcttggatggggcagctcctggatctgtccctgcatcctgggggtgggactcactgtcacacctcttgtctcagccttttttttttccctcagaggttggaatatgatgctaatgagactctactcatggattttagccccttgggggccaattaacttaactttacttcagctgccgggaacctcagatctaaatccagatcaattagctcatcccaggtgcctggtaatatctgttccttcactcattttaactattctttgttccatttttatttttaattgtcctgatttatatcttatttaactttgtaatatcaccttaactgtgccttgggggtaggtggggtatgaattctaaataaataagtaaaatcattttaggtgtcaactctggagaggaagaacagctcatggatcctcctctagatggaagctgaggttattcctgaaacagtggcttgggaaggtgaattcttactgaaacacagggggagcttggggaggggcagggagagggaatgagtgtgggagcagctgggcagacaaaccctgtccatgtgggtgagtgtagcctaatagtggaacaagactgttcatgagaactcactggggagccagaacccacccaggattttggggccatgtagaatggcctacattctaaaggaggaggttgcaaagaaagttacatttgctgtgctgtagtgggagagccttagatttgaatcctttcttttaaaataatgagtgagttgtgtgacggtgggtgaatcacttaacctctctgagcttgtttcctcatctgtaaaatagaagaaataattcctgtagaaaattaaaaagacagcaaagtgcagtgcctggcacttgctaggggataagtgatgaaatccatttattccaaagatatgtattcattcatatccaaagatttgcattcatattcatgcattcattccaaaggtatgtattgagcttacactatgtgctaggcattgttctaggaattgatgatatacggttgacccaaacagataaaagttttgacctgacctcttgatgctgatattccagttgagaagactaataataaataatcaaatgaaatatataacacgaagtagttgtaagttctgtagggagaaaagaaagcatgttaatgtctagctcagaagttggcaaactgcgatctgtgggccaaatctggcccgctcccagtctttgcaaatgaagtttcactggaacacagccatgctcatttgtttattgattgtccatggctactttctggctacagtgatagagctgagtaattgagatagagacactgtggcccataaagcctaaaatatttactacctggatttttatagaaaacctattctactcttggtctagaagaaaacaggattagtaggagcagcagtccaggtgaaaagagaggctaaggttttatcttcccctctcatttagtgcctcatttttccttctcttatttcatcttcctttcactgtcctcctctctttctccctctcttcttttcttccttccttctttctccccacccccctgtgtttttgttgttgtttttttttgttttttgttttttttgagacggagtctccctgtgtcgccagggctggagtgcggtggtgtgatctcggctcactgcaagctccgcctcctgggttcgcaccattctcttgcctcagcctccggagtacaggcgcccgccaccacgcccggctaatttcttcttcttcttttttttttttttttgtatttttagtagagatggggtttcaccatgttagccaggatggtctcgatcttctgacctcgtgatccgcccgcctcggcctcccaaagtgctgggattacaggcgtgagccaccgcgcccgcccccaccccgcctgttttttgatctgaaagattccttctatttcagtcttctccacttatggagagaagattgaattccagaaaccggaagtgactgccagagtaaggtgtcccgggagaggccgtgaggggaaaaacacctatcattgttgttcttctccctgcatctttcaacaagtacccagcacattgttaggggttaagagtagacaagagatataaaaaacaggaacagcatctagtacagtgcctgggacgtaatgcatgatgcatggtcaatgaagcttagctggcttaaagaaaaaaaaaaaaaagcccaatctaattgcagaggcaaaaaaaaaaagaaacaaaaacaaaaacaaaaacctcataatctgaataccagaaactaatcagagccttagagattggagattggtgtttttcaaggaagcagcagcattggcctagatatcctctcctgcaactcaacactcctccctgcatcatagctacctctgagcccactttaaaaactgctgacttaagccagtatctttatttcaaacgtggtggaaattgagtctcagagaagagagtaacttgcccaaggctacctgcccagcaagttcagggggagatatggaggagccaggattagaacccaggcatcctaggttcccagtgaaacactcttctgactgtagtactctgctaagtaaccatggaaatatggtatatcttttgaaggacaaaagacacttatattccctccaagctataggatttgagaaggggctgatgtcatcaggaaaaacttcctagaagaggcagagcttaggtggaacttgaactaagtccaagaggcagaaacaggcagaggaactgctctgtatctgtaaagacagcagtaagtttcccaacctgtcaaaattggactgactgtggtcacaggttcaattctggttagaaagcaaaagcaagactagggaattaggttagatgtagttaagggagaatcttgggcttttaattaagatgtttggacttgatcctgtaagcctatagtcacaaacaggtgcacttgtcaacacatggctatgttcttgtatttgacactcacagggctagagtggaagagagaacattggtcaatgctttaaataggagagatttcatatacctgtatttcctcctggcttatcctgaaacaagtgacccagcagcctaaagatctcattcctacgtggaagctctctactgtccttccagactgggacctgtgcctacgatttgtcaccgtattccctttttaaagtctacacctggccacgtcattcctttgtgtttactgcctggactgtgggtttttgagtttgcattctct

SEQ ID NO: 967 - protein, 193 aa, Homo sapiens
MPEEGSGCSVRRRPYGCVLRAALVPLVAGLVICLVVCIQRFAQAQQQLPLESLGWDVAELQLNHTGPQQDPRLYWQGGPALGRSFLHGPELDKGQLRIHRDGIYMVHIQVTLAICSSTTASRHHPTTLAVGICSPASRSISLLRLSFHQGCTIASQRLTPLARGDTLCTNLTGTLLPSRNTDETFFGVQWVRP

SEQ ID NO: 968 - DNA, 582 bp, Homo sapiens
  source 1..582: mol_type = genomic DNA
atgccggaggagggttcgggctgctcggtgcggcgcaggccctatgggtgcgtcctgcgggctgctttggtcccattggtcgcgggcttggtgatctgcctcgtggtgtgcatccagcgcttcgcacaggctcagcagcagctgccgctcgagtcacttgggtgggacgtagctgagctgcagctgaatcacacaggacctcagcaggaccccaggctatactggcaggggggcccagcactgggccgctccttcctgcatggaccagagctggacaaggggcagctacgtatccatcgtgatggcatctacatggtacacatccaggtgacgctggccatctgttcctccacgacggcctccaggcaccaccccaccaccctggccgtgggaatctgctctcccgcctcccgtagcatcagcctgctgcgtctcagcttccaccaaggttgtaccattgcctcccagcgcctgacgcccctggcccgaggggacacactctgcaccaacctcactgggacacttttgccttcccgaaacactgatgagaccttctttggagtgcagtgggtgcgcccctga

SEQ ID NO: 969 - DNA, 22456 bp, Homo sapiens
  source 1..22456: mol_type = genomic DNA
tttttgaccttcctgtttcctggaactcagccatggtggtgtgtcactttgtactttgcagacaagggcatcacctttgatgtgtcggaggcacttcagtgaaagaattttggctcctaaagattttgcagaacagagatgacatgccagcccagactttcatgtaggtgaaaattgtttcttgttgcttccttttgcacagaattctcctagtcctgctggctcatgggataaagaaaggaacaggaatgagccgggcatggtggttcacgcctgtaatcccagcactttgggaagctgaggcgggtggatcacctgagatcaagagttcgagaccagcctggccaacatggtgaaaccccgtctctacgaaaaatacaaaaattagctggtcatggtggtgggcgcctgtaatcccagctactggggggctgaagcaggagaatcccttgaacctgggaggcggaggctgcaatgagccgagattgcatcattgcactccagcctgggcaacaagagcaaaactccgtctcaaaaaaaaaaaaaagaaaagaaaaagaaagaaaggaacaggaatggaagagtgagaagtgctgagacaaaagtgtcttgataccctccctcccagcagaaatcccagcagtgagaggcatgctatatagttaagcgggaagctgtaagttgaaggatccctgtccttttcctgttagaactctgccaagggtaacactgaacccgctacgctgtctgggttatataccctggggttctttgacgtgtgcagagaaagaattcaggacacaggcacaagtgagtgggttaagagtggaaagtttaatagaagaaaggagagagggccgggtgggatggctcacgcctgtaatcccagcactttgggacccaggctgaggcaggcagatcacctgaggtcaggagttcaagaccagcctggccaatatggcgaaaccccatctctcctaaaaatacaaaaaagtagctgggcatggtggtgcacgcctgtaatcccaactactcgggaggctgaggcaggaggattgcttgaacccaagagggggaagttgcagtgagctgagatcaggccactgcactccagcctgagtgacagagcaagactccatatcaaagaaaaaaaaagaaaagagagcagagaggagctgagagagagagagagagagatccgaaaaaaggggagccagcagaccacagcagattttataggcaggctagagaaggcggtgtctgttttacacagggctcacagattgatttgattagatatgacgtctacatagtgtgcagggaaggctggttgccccaccctaattctgtgtgtgtgtgttttgagatggagtctcactttgtcacccaggctggaatgcagtggtgtgaccttggctcactgcaacctccacctcccgggttcgagcgattctcctgcctcagcctcccgagtagctgggattacaggtgctcactaaaacgcccagctattatttggatttcatcattggccaggctggtctcgaactcctgacctcaggtgatccacccgcctcggcctccaaagtgcagggattacaggcgtgagccacagcaccccgctgccccagcctacccttcttaagcaaataggctttctagttgatctgtgccatcttgtctgctcctttacagcacacgtggctggcagagaagggaagatagagccgccatcttcaatatatctagtccttagttcccgctggcattcatccaggcaagctcccagcttgcaggctgctgtttgttagaaaatgatttggggctgcttttcattaaaaagaaaagccttaccgaggactcccatgcccttgctctctgcctaagtaattccttctctctctcttttttttttttttttttttttttgagacggagtttcgctcttgttgcccagactggattgcaatggtgcaatcttggctcaccacaacctccacctcccaggttcatgcgattctcttgcctcagcctcccgaatagctgggattacaggcatgtgccaccacgcccagctaattttgtatttttagagagatagtgtagcaggacgagctgcagacaaaactcctcagacaccgagttaaagaaggaaggggtttatttggccgggggcatcggcaagactcctgtctcaagagctgagctcctcgaggatgcaattgctgtcctttttaagggctcacacctctaagggtgtgagcgtgagacggtcatgattgattgagcaagcagggcctacgtgactgggggctgcagggtgtggcgccgggctgtctgcttgtggatttcatttctgccttttcgtttttactttttctttctttggaggcagatattgggcataagacaatatgaggggtggtctcctcccttatcccccccttttgagactctcgctcaatactggagttctcactttcatttttactacccgtgtcttcttgcaagacagatcaataatgattcatatagtacacttgtgctgaagcatttcggtgaactaagttagcgatgacgctttttatcatttgaagaagtacaggtagcaaacaagcaagcagtaagtaggttcttattactattataactcttactgtaagagttttaaatcttcctagcgctgggaactattttctaaacatggcctcaggatcaaatttatgccacacttgcacgggcacatgtgccagttttgtcatagctctaactgtgtcttcaactacttgcccttgattatctatgtgtaggcagcaattagtaaggttaaatttcctacagacttctccttcagctgctagcaagtagtcgagagctaatctattttgagagatagcatttctcatctgagtttcttgctgggccagaatggtcaaggctgtgccggttttattggtgattatttttaagacagcttgtaaccatatgatttggttgatcacgtaaatgggagtccagtatcttcacgagccatcttgtgcctaagtagcaggactataatattgtatgattctctcgggggccatttatcattttttcaatttcttatagctatgcttctcttttcgagggaagcatagacagggaagcccaggagttcacctgtttttatgggcagtaggaagaaagatagtttaatagtgctaataacacaactgcctgcctactggttaggcaatttggcataagctctatgcctacatacgtagcataatctagtcggggctgtctagtcccggtgggactccggctatgtctacacggtttgcaactttgggaattttttactaagtggatttctctctgtgtgatttgaactctaccaagtgactgtttttgtggtaccattatacagtttctgtctcagacaactaaatcgtcctacggggtgagtgaattcttttctttctctagctatgcgatattgtccaataattgaggcttttaggacctagaaattatcagggtgattcttttgagctgggaattcatcaggaactgggtctgtaggtactaattctcgtgcttcctatggccattgatctcctgtgacagttcttccacatatataacatgaagtgacattgagagactgggtcacatgctcggctaattgcaaaaacaaatttcttgtttttcatggaatttctggtactggcacttttagtttatcatagaaggtttgaaatactggctcgggagagcatttatacactttttctcaaaccacgatatttacttgaagatccagtctagctcttatcaattttttagggttacacgttcctcttttttccagcgaggatcaaggggattggttagtactagctctaaggggttacattgtcctttagtacaggaagagccattttttcctttctgaaggtggactggatccttttcattttttttttttttttatctaattggcctaaatgacacaagaccatcactttgggaggccgaggtgggcggatcacctgaggtcgggagtttgagagcagcctgaccaacaaggagaaaccctgttaagggaggggacagcccctcatattactttttgagagaaaagaaagtggaagataaaccaagtatataatttctaagaaattgaccttttgttttaaatgtggggactgtggcagtggactttatagtccttagtgcctttttactgagaaatttccttcagcacctatttttattagtttttagaccaaagaaatctaaacactattttatgtttaataatgctttttgtatgatttttataccagataagctaaattttatttttatattagtgtgttattaatgttaaacctaattttaataaaaccttgtagacatatttatctaatttttaatgtttgactataaggtatgattttatagactcttttcaaccttttataatttttgctaaagagcaggttggtggtttaagaaaaacctgttatgcttttactttaatgtccagaaaaactgggtgatagttctttaactttagctaatatgtttacacacagaattttctttacaattaacgttttaaaacttgcttaaatcttcaaaacaataatttttttaacttaactttttaatgtaggtaaaaatgtacactcttatgcctccttataatccttttactaaaggtatattttacttttcttatacaccttgcacataaactgttttttttttcaatagttttacattcaggaggcctagttacttttaaattatacaacattttttgcataaattctttttttaacactatttttataacttatttttctttcacaacttttacaggcaatttttcgacatgccttaactttcggacttactacaaacatttctttctttaaacaaccagttaatttatttcaagacaagaatttaccatataatactctttttatataaattctgccccacctttttttttccttttttttttctcgaagatgataaccattcttttccaaagcgaacctttttttatgtctgtggactagactgtctaaggccagaagcatagaagttactgtcatacatgttaaactgttaacttttagcaaactttacttttgttgaaaaccttgtaagtcgggattttaattatcctttgctattgataagaccttgttttctctaaattagaattggtatagatggctttttttttttttttttaattacccgggaggaaccatcattcatgctgtcctgaagggagttcctcctacgtctggtcagacgttcgtatttggtaattaagatttagatcccctgttaggaaacctgctgagtgaatggaattttcagtggttaatgttaaatcatcttctttctttctctctttgactttgtcactctctctttgactttccttttgcctctgtctctttctctctctctctgcctctctctttctctctctttttttttctttctctctctctccttgactccctctttgtctgtctcttcctctctgtctctttcctttctctctctctgctggtctttccttgcctctgccagccacttatgctactgttctctcaaccactgtgtgttgggggcgggaggtctaaaaccagctgtaaccaagtgtctatgtatgggagctggtctgggtgccctggcttacagattaccttgtgccataccttcgaaacagaggacctctccaggcttccttctaatggccaacttacctctaatgctggccagtctatcttacacaaagttttaagttttcctggtgtcatagtactccatagtctcctttaaatgtttttttgaaaattttcaacctagttcctagtagggtgggcttattggtgcctgacctatgcttcttcgagacaaaacaccacgctcacaccacacgcacaccacaaaacaaagaacgggtaaaaagggtacacacacacacacttttgcagtttgcaccaaaccaaaatcaaaaccaaaatcggagtatccagatatccaagccacgtcaaaaccaaaaccaaagtatcaagcaatccaagtcaagtcaaaaacaataaccaaagtgccagtacaggcacgccgtgggtgatcaggccacgcttccactcaaatggagtgggcaagttcctgagaccaatcctgtcaagcaattcaaaccaagtcaaaaccaaaaccaaagtgccggtacaggcatgccgtgggtgatcaggccacgcttccactcaaacggagtgggcaagtttcaaagactagtcttaccaagttttagatgtccagactccaagtgcccgttccttcccggcgttcagccaccgcgttgatcctccacgggggcctgccacacactgctctggcgaggcgtcccaccggcgcaaatgcctacccggaagcactctcaggatccgcgccactcgggctggtcggagtcccctgcagggatgttccacagggcgggcttaagtgcctaaggagctgcctcgaccctctgccaatcacctcgcttcccggtcagggaaccaagaaatgtagcaggacgagccgcagacaaaactcctcagacaccgagttaaagaaggaaggggtttattcggccaggagcatcagcaagactcctgtctcaagagccgagctcctcaagtgagcaattcctgtcctttttaagggctcacacctctaagggggtgagcgtgagagggtcgtgatcgattgagcgagcagcgggtacgtgactggggactgcatgcaccggtaattagatcggaacaaaacaggatagggatttcacagtgcttttctctacaatgtctgtaatctatagataacgtaaccgattaggtcaggggtcgatctttaactaccaggcccagggtgaggtgctgggctttctgcttgtggatttcctttctgcctttttgtttttactttttctttctttggaggcagaaactgggcataagacaatatgaggggtggtctcctcccttaacagggtttctccttgttggtcaggctgctctcagactctcgacctcaggtgatctgcccacctcggcatcccaaagtgccgggattacaggcgtgaaccactgcacccagccagtaattcctttttaattcctatatcaacaccaaggggcatatccctgtggcaacttgagatcagccacagcaaagggaaacagaaggagtgaccaagttggacaaagaggaagcctgagttggcactttcaagctgcccgcggcttccagggttatggaagagaggcagaagtttccagatttcccttgggggaaagcagaaggcagccaaaaatcagcctggtgggcctcgggcttcctcaggaggaaagtgatcttactttctgtgctccaactgtcctctgggtctctcccctcaactctttcccttcacagggctcatgattcccctgacttagagcaagagagagagagagagagagtgccaacatcagtggacgtcttgtcctggagcctcagctctagagtctgcagatggggaaactctggttttagaaaaccttcttctcaaaaataatgcacacgaccgtggggcgtggtggctcatgcctgtaatcccagaactttgggaggccaaagttggcgaatcacttgaggtcaggagttcgaaaccagcctggccaacatagcaaaaccccatctctactaaaaatacaaatattagccggatgtggtggtgcacatctgtaatcccagctacttgagaggctgaggcaggaggagaatcacttaaacccgggaggcagaggttgcagagagagccgagatcacgccactgccctccagcctgggtgacagagaaaggcgtcccaaaaataaataaataaataaataaaaattaaaaaataaaaaatggtgcaaatgacctccagcagaactgcacagactggaaagtggtcagaggccaggtcaagtcactaagtgactcaggtgggaaggtccaggttcttcaggtacacgatatggatccacattcaaatctaggcacttcctctcccaagctccttgctaggtggattaagctggtggccttcctctctgagcctgctcacagggaaaatagaaataacagcatgattcacttcatagggttcttgggaaggtcagaaaaggtgaaacctgacaagtgcttagcacaggactaaaccctcaattgcgcatgggtcttctggttggttgtgttccggtatcattcaaaccacaccacgttgagtttgtgtgcgtacgtccgcgtctgtgacgcgtgcaagtgtgcttacgaaagaatatccttgaagtaaaatttctggaccaaagggaaggtgcattttggtgcattgatagatttcaacaagctgtccttccagaaagttggatccatttcagctcctagcctccaggtttgaggctccttctcacccacgcacttgctgagcagtgaatcatcaaacactctgatcttttaccaaatcacaggtgacaagataaagtgtggctgggcacagtggctcacacctgtaatcccagcactttgggaggcccaggtgggcagatcactggaggtcaggagttcaagaccagcctggccaacatggtgaaaccccatctctactaaaaatacaaaaattagccaggcgtggtggtgggcacctgtaatcccagctactcaggaggatgaggcaggagaattgcttgaacctgggaggcggagattgcagtgagccgagatggcgccactgcactccaagctgggcgacagagggagacacgatcttaaaaaaaaaaagagagagagagagagaaagaaaaattgtgtttcacggagctttcaatttccaattttcttgtggtgaacgagattcagtttcataagcagttgtattttttttatttatttatttttttaagacagactctctctctgtctctcaggctggagtgcagtggccagatctcagctcacgacaacctccgcctcccgggttcaggcgattctcctgactcagcctcccgagatagctgggactacaggtgtccgccaccacgcccagctaatttttgtatttttagtagagacggggtttcaccatattggccaggctgggcttgaactcctgaccttgtgatccgcccgcctcggcctcccaaagtgctgagattacaggtgtgagccactgcgcccggccaagcagttgtatttatttttatgagttggctgctcctgtctcattttgggattttcctaagacacctcggcctcccaaagtgctgagattacatgtatgagccaccccaccccatctctctttcccccatcttttagaaggtattagttatttcttaatgatatgaatctaaactatttatatcttaagctgataaaaagatcagctaagtaaatattaaataaattaaggtaggagattgtcttgaaggtgctgtctacccgcttcccccagacctggagtcctagggcttccgtgaaggaaatccctttagtacttggggatctcagggaggatattttgatttctggatacctcaaaattctggacctctttgaccaccctcttcacccacccagcaaatgctataggctcaggctctgaaatctcccatttttatctcctttcaattttttgctttttgttggtaattttgctgtttcaaacagcccccaaatagtgctgaagccctgtctaatgtcccccaagagcaaggaggccgtgatgagcctcacagaggaggaaatccacgtgttagagaagctatccccaggcacgagttctagcgctgttggctgtgagtttgctgctgatgacactgacttcttgatgattcatagccagaggcccttgggaccctaactgtatgtatatacagacatatttttctttccatttgagagcaggtaatgtttattgaacagcttagaaaaataattatagtacacaccatagttcattcttctaacaagcctgttgatctggtcctccctgttgccagcatctccaccttccacgaaatgggtggtctgtttcttcattctgcctcatggagaagatactttgaaggaccacaggaagttatgtgcttctttgaagcgttttccaacagtatggacctcatgaatcacatcctccatacagatgatgccatattttccaagagatcgtgcaaagcgttatctgtcaaagcaattcgtttcttattgattttgccataaccacgcttgtagattagtttatttactgacttcagatttaggtacccgcatgcaatgtatggctctacaatcctcagcatgttaattggccttcacaaaggttccattgaagatttgacaaaggcaaagaagctgcaacacatttcggacctttgggctcacaccatcgatacctctgatcctgatgacaaacgccagtctggattctgcaggttcatagaagttgccagcttttcttgacatcttttccattcgaatttcagttctgtacctctgcctatattccttgtgatagtgcttcaatttttcatagataagcttcctccttgcctttcgaagcatcttttgggcaaacttctttctcaggcgcttggtcttcagctctgtgaaattccttcgctttttcttaggggtttctggcacagcgggaacttccttcttcttctcttctacaccctccatggttccagccggaaaaagaggctggatcctctttttaaaaaatatatatatttttaagacagagtctcgctctgtcacccaggctggagtgcaatggtgtgatctcggctcactgcaacctctgcctcccgggtttgagcgattctcctgcctcagcttcctgagtagctgggattaaaggtgcccaccaccacacccagctattttttgaatttttagtagagatggggttccaccatgttggccaggctggtctccaactcttttttttttttttttgagacggagtctcactctgtcacccaggctggagttcagtggcgtgatctcggctcactgcaagctccacctcccgggttcacgccattctcctgcctcagcctcctgagtagctgggactacaggcgcccgccaccatgcccggctaattttttgtatttttagtagagacgggggtttcaccgtgttagccaggagggtctcaaactcctgatatcaagtgatccgcctgcctcagcctcccaaagtgctgggattacaggcgtgagccactgcgcctggctccttcttggtgtttcttgactttcatctgcctcattcagtttctgtttctgttttcacacggctccttctctatgagcctcttttctctccacctgagggcccactctaatccagtatgacctcatttaagcctaattatatctgcaaaaaaaaccccgtaatttcaaaatgaggtcatattctgcagttccaggaggccatgaattctgggaggacaccgttaacccactacagccatcgagaacagcagcaggaggctggatgcggtggctcacacctgtcatcccggcactttgggggacctacgcagcaggatcgcttgagcccagatgtttgagaccagcctggtaacatagtaacaccctatcctctaccccccccaaaaaaaaaattagccgggcatggtagcgtgtgctggtagacccaactatgcaaaaggctgagatgggagggtcactgaagcccaggagtttgaggctgctgtgagctgtgtggcgccactgcatccagcctgggcaacagagcaacactctgtctctaaaaatattaatttaggccgggcgcggcggctcacgcctgtaatcccagcactttgggaggccaaggcgggcagatcacgaggtcaggagatggagaccatcctcgctaacatggtgaaaacccatctctactaaaaatacaaaaagttagccgggcgtggtggcgggcgcctgtagtcccagctacttgagaggctgaggcaggagaatggcgtgaacccgggaggcggagcttgcagtgagccgagatggcgccactgcactccagcctgggcgacagagcgagactctgtctcaaaaaaaaaaaaaataaataataaaataaaataaaaataaaaaataaaaatattaacttaatttaactttaaacaaaaaagcaggtggtctccaagaatgcaggagataactgaccgggtgcagtgtctcatgcctttaatcccagcactttggaaggccaaggcgggtggatcacccaaggtcaggagttcaagtccagcctggccaacatggtgaaaccccatctctactaaaaatacaaaaaattagccaggcatggtggcgcgcgcatgttactcccagctactcgcgaggctcagacaggagaatcgcttgaacccaggagatcgaggttgcggcgagctgagatggcgccactgcactccagcctgggtgacagagggagacctccgtctcaaaaacaaaacaaatcaaaaaaatgcaggagaggggtacacgaatatttggggagcacccccaattcttggatgtctgctgtatccccagtgcacagcacaatctaatccctaataaatgtgcagtggaggtttgttgaataaatgaatgggccccagaagaatgaggtggagaggggaataggaagattgaatgtctcctgcctgaaggtcgggcggggaggggttgggggcaggcaactctgaggctcacccggggccactgcctgcatcctggcaactgcctccacccactttaggatcttcagactggcagcggttggagggaatttcccctcgccaattgctcaagtccctcccctcgaccggccggacatccccagagaggggcaggctggtcccctgacaggttgaagcaagtagacgcccaggagccccgggagggggctgcagtttccttccttccttctcggcagcgctccgcgcccccatcgcccctcctgcgctagcggaggtgatcgccgcggcgatgccggaggagggttcgggctgctcggtgcggcgcaggccctatgggtgcgtcctgcgggctgctttggtcccattggtcgcgggcttggtgatctgcctcgtggtgtgcatccagcgcttcgcacaggctcagcagcagctgccgctcgagtcacttggggtgagttgagatggaaaagttgggaagaaaacatagagaggcgcgtgaccgaaaagacagaatgagatgggtacaaagaggccagagaggaagatctggtagggcagagacagagaccagaacagggaggcgaggcggggaccaggctgcccggtgtaggggctacgagacaggcagccctgccaggaggtacagggagatcccgggatgggaaaggtaggcacacatggaaatggaagatgactcggctctggtgttcccccggcaggctgactcagaggctgctgggggcttcacaaggctgggcgtgggggcttcctggggcctcctaggacgggatggccccagccactcgctccgggtgggggaggggtccctttggggaccgcgccgggcgcctttgcagcgtagagagtccgctgcgcgcggtgctctcgcgcccagtgacatccaggaaaacgattcgggaaacgaagaagttcttttgaaggtctcgacttcacgttccccgctggttcagacctgcttcctctttaagaagtcttaagagtaaaaaaaaataaaatgaaataaaatcaccagtgcgcgccgtgggatgagaggtggaaaggaggatggacagagaaaagagagctcctggcacaggggacacatagaacctctctgcttacgtccgtgccctgttttctggtcttttcttccagtgggacgtagctgagctgcagctgaatcacacaggtaacacgggggacgtggagggacggggagaagaagaggcacagagagagaaggaaggagaggtagaaagacaagtggggagagacagagagaaagagacacagacagagacggagggagagagggagggagagatagggagggaaacggagagggggagacagagagaagacagagagggagggagaggcccagagaaagggagggagagacagaaaaaagaacagagagagggacagaggggacagacgggacaggagaagaaggggaaagaaagaaacagggagagacgcagggagagtggaagagggagggagggagacaggcgggggagacagaacgagagagagggagagagacggagaaagagaaaaaagacagatagaggaagagagaataaaaacgagagaggcgacctggcgtggttgctggagcctgtaatcccagcgctttcggagggcgcggcgggtggatcacttgagcccaggagtttgagaccagcctggccaacatggtgaaaccccgtctctactaaaattacaaaaattagccgggtgtggtggcaggcacctgtaatcccagctactcaggaggccgaggcaggagaatcgcctgaacctgggaggcagaagttgcagtgagccaagataatggcactgctctccagcctgggtgacagagggagattctgtcaaataaataaataaaaagaagaaaggaaaagaaaaagaaagaaaggaaggaaggaaaagaaagagaagaaggaaggaaggagagagggagggaggtgagagagagagaaaggaaaaagaaagaagaaagagaaaaaaagaaataagagaaagaaaagaaagaaagccagagagaggaaaagagaaggagaataacagagaggaagagacagagacagagagggggaagaagaaaaacagggcgggggagaaagagatcattcccaagagaaaaaggaaaagggagagaacgagagagagagagaggagagagagagcgagcaggtttgtgtttctgggcatccactacctttctctccctttccctctcagtccttcacattcgatctcctcccttggaagaatcaaaggggttttgttagtaaacgaaaacgctcacaggaaaggctacccttcctccattcatgctacaagcactaattatacatctgcagtgggcaggcactgttccggtactgcagtcgcgcacaaaacagacagaaatccctgcctggtgagcttcccttctactatcactcctaccgaggaggagatgaccaaaaaaataaaaacgaacatgtgaaaaacagagcaatgccacgtagagtaaaacaggccaagagcaggttttagagaaaaaatcaggcaaggaggtgggtggggaatccgggcatgccagggttggggattttcatttaaagtggagtcgcggcggtcgggtgggggggtggtatctgagtgggtggcattggcaagaagccttgagggagaagaaatgaacagttctgctctaggtggaagtctctacctcctcccagcctctctcgaacgcttcttcctcttctgtttttccacggttcatccccagagactaaaattactgcacgcttgcgtgttttgttccttccattttgtaatggaagggacctttgttgctctctcttctccttgggtctctgacccctgatatatcttccccccctccccggcctttgccatatttttcctgtaatttggtcttgaggcccctttctggagagtggctgtccagccccacatcgatggggcaccaggggtggtggccacaggtgttgacagtgtctttcacaggacagctctttcttctggtggatgatatcatgcctaagtgtgtgacaggggaccaggtgtcactcttacaggaaatttgcaaagcctggtaaacacccttggggctcctgtttgaccccgttcagttccttcctaacaagatagccagtctccaggagagccttgagtgaggaggagagtgaggctcaggtgtgtcagtcagataagttgcggagacaggagacgctgagatgaaacacgtgaaatatagccgaggaccttggctcccggctgtgatcccagcgctttgggaggctgaggtgggaggatcgcttgagcccaggagttctagactatgtttcttgggaaacatagcaagaccaccatctctagaacaaaattttgaaaattagctggtcatggtggcgcatgccacctcccagtgactcgggaggctgaggtgggagatagcttgagccccagaggctgaggctgcagtgagctatgattgcaccactgcactccagcctgggtgacaggaccagaccctgtctctaaagaaaataaagatcctagagagaagagggccaacgggaaggtaggggagctctctgagacacacactcaaccagcgggtggaaagcaagaaaaaaaaagggtcctgggagccaaagcttttattggcgttcagggtgtgacccgagcaggcgtcccttggggaattctctcgtgcactctcttgcgcgctgtctcgtgcgcacgctgtctctctcgtgctgtctgtctcactctctcaggcactctctcgctcactcccgtgcactctcgagctctgtagctctcatcctctctcacacacacactctcccatgcactctctcgagctcactctcacactctgtctcgtgcactctctctcaagctctctcgtcctctctcacacacacactctctctcttgctctctctctcatgctgtctctcgtactctctcctgctctctcgtgctctctctcactctctcgtgcactctccctcaagctctctcgtcctctctctcacactctctcgctgtctcatgctctctctccctcatgatctctctctctctcatgctgtctcttgcactctctcctgctctctcgtgctctctcgcactctctcgtgcactctccctcaagctctctcgtcctctcacacactctctcgctctctcatgctctctctctcatgctctctgtcgcactctctcgtgcactctcgtcctctctcacacatacactctctctcttgctctctctctgcattctctctctatatatctctccctccccctctatctttacccttgtctgtttctgttttttttttttttttttttgtctctctctctcctggtgtctctctctccctgtctctacccctttccccttacccctctctccttccctttagatctctaaccttctatccccctcccttttttttgagacagggtttctgtgaccaaggctggagtgcagtggtgtgatcatagctcactgcagtctcagcctcccaggctcaagcgatcctccagcctcagcctcccaagagtagccaggaccagaggcgtgcaccaccacacctggctgactttttattttttgtagagatggggtctcgccctgttgtccaggctggtcttgaactgctgacctcaggtgatccacccgccttggcctcctaaactgttaggatttcaggcatgagccaccacgtccaacctattccttgatctctaactctcgatctctatatctgactttctctatgaccccctgtgcctcagtttccctaaacctccatcctctcatccctctaaccctgtgcccccaggacctcagcaggaccccaggctatactggcaggggggcccagcactgggccgctccttcctgcatggaccagagctggacaaggggcagctacgtatccatcgtgatggcatctacatggtacacatccaggtgacgctggccatctgctcctccacgacggcctccaggcaccaccccaccaccctggccgtgggaatctgctctcccgcctcccgtagcatcagcctgctgcgtctcagcttccaccaaggttgtaccattgcctcccagcgcctgacgcccctggcccgaggggacacactctgcaccaacctcactgggacacttttgccttcccgaaacactgatgagaccttctttggagtgcagtgggtgcgcccctgaccactgctgctgattagggttttttaaattttattttattttatttaagttcaagagaaaaagtgtacacacaggggccacccggggttggggtgggagtgtggtggggggtagtggtggcaggacaagagaaggcattgagctttttctttcattttcctattaaaaaatacaaaaatcagctgggcttcgtggcgtgcatctgtaatcccagctactcggccgactgaggcaggagaatcgcttgaaccgaggaggtggaggttgcagtgagccgagattgcgccactgcactccaacctgggcaacagagcaagactctgtctcaggaaaaaaaaaatgttcttggttagggatgtttgaagaatagaggaagtgggctgggcacagtggctcatgcctgtaatcccagcactttgggaggctgaggaaggcagatcgcttgagcctaggagttcaagaccagcctgggcaacatagtgagacccccatctctacaaaaaatacaaaaattaaccagatgtagtggtgtgctagtccaagctactccaaaggctgaagtgggagattgggtagagcccaggaggtcaaaggctgcagtgagccgtgatcatgccactgcactccagcctgagcaagagtgagattccttgtcaaaaaaaaaaaaaaaaagttctgttttctccttggtgcatctatttgacaagagaggaaacacaaagatcactttgggtgactgtctctcaaagcagacaatgcaaaatacctaatgagttgggaggccagggtgggtggatcacttgaaatcaggagttcgagaccagcctggccaacatgtaaaactccgtctactaaaaatacaaaaattagccaagcgtggtccagggcgcctgtaatcccagctactcaggaggctgaggcaggagaatctcttgaacctgggaggcggaagtttcagggagccaagatcgcgtcattgcactgcagcctggtgaggggtgtcgcaaaccaccatggcacacatttaactatgtaatggaactacacatcctgcacatgtaccccagaacttaaataataataataaaagatcacttgaggtcaggagttcaagacaagcctggccaacatggcgaaacctcacctctactgaaaatacagggtcttgatctgtcgcccaggctgcagtgcggtggcatgatcctgtctcactgcggcctcaaactcctgggctcaagcgatcctcccacctcagcctcccaaatagctaggaccgccagcacaggccaccacacccggctatttttttttttttttttttgagatgaggtctcattacattgccccagctggtctcaaactccaatctcccgaaatgccgatcttcccgcctcggtctccccaagtgctgggattacaggcatgagccactgcctggacctcaaatacattttggaactcagaatttaccagtatttaaagatggtgtacaggattataccatctttttttttgagatggagtctcgccctgttgtccaggctggagtgcagtggcataatctcagctcactgcaacctccaccctcccaggttcaagcaattcttctgcctcagcctcccaagtctgggactacagaaatccgccaccacgtccggctaatttttctattattagtagagacgggcttcaccatgttggccaggatggtctcgatctcttgaccttgtgatccacccgcctcggcctcccaaagtgctgggactacagttgtgagccaccgcgcctagcgcttataccatcttttatgcatcacctcagtgaggtcgggacagcattttgtaatcaaacaccacatcttttttttttttttttacaatgagaagtgttaacattcacactaagtgggataaaaatcaagactacaggccaggcgcggtggctcatgcctgtagtcccagcactttgggaggccgaggtgggcggatcgcctgaggtcaggagtttgagaccagcctggccgacgtggtaaaaccccgtctctactaaaaacacaaaaattagccaggcatggtggccggcacctgtaaacccagctactcaggagggtgaggcaggagggtcacttaaaccccggaggtggaggttgcagtgagccaagatcatgtcattgcactccagcctgggtgacaagagcgaaactccatctcaaaaaaaaaaaaaaaaaaaatcaagaccacagttaccaatctggctaacatggtgaaacctcatctctactaaacatttaaaaattagctgggtgtggtgatgggcacctctaatccatgctactagggaggctgagacaggagactctcttgaactcaggaggtggagattgcagtgagctgagatagtgccactgcactccagcctgggtggcagagtgagactgtctttaaaaaaaaaaaaaaaaaaaaaaaagactacaattaacaaaaagttagttcaggtcagagattgctgccaaacaattcaccaaaacaacttgatttccagggctttttggattttggaactggggactcaaagtcaagtgcttcttacggcatttaatatggactgcacactgttttatcccattaactcagctcgtgttcatgcaagccctacaaagctggaggaatcatcattgttcccatttcacagatgaggaaaacagaggcgtaaaccgttgagtcatctgtccaaagttactggttttgtaacagctggaacctcagtatttaacagttgaggaaaatagtggcagaaaacctgagtcacaagcccgaggcaattcatctacatagtagtggactcaggattccaagccagataatcccgcatcttgcatccatgatctcacttctagaaggggaagtgagaggagtggtggggtgtcccagctgagggagggaaaatgagacccatgcgccacccgccctcacaaatctagccctgcagcccctctccaaccttacctggactcagaaccatgcatctggaaaagccacagacactcgacgccagcctgtgaaagcagccgggagggaggctgtatcctgcaaagccacagggaaggggctgcccaagaccatgggaacccaccacttacatcagcgtgacctggatgtgagacacagagtcaaaggagattatctggcagctttaagattggactgcctgactattcacaatagcaaagacttggaaccaacccaaatgtccatcaatgatagactggattaagaaaatgtggcacatatacaccatggaatactatgcagccataaaaacggatgagttcatgtccttcatagggacatggatgaagctggaaaccatcattctgagcaaactattgcaaggacagaaaaccaaacaccgcatgttctcactcataggtggaaattgaacaatgagaatacttggacacagggaggagaacatcacacaccggggcctgtcgtggagtgtggagtcgggggagggggggagggatagcattaggagaaatacctaatgtaaatgacaaattaatgggtgcagtaaaccaacacggcacatatatacatatgtaacaaatctgcacgttgtgcacatgtaccctagaacttaaagtataattaaaaaaaaaaaaaaaaaaagatttgactgcctggccaggcacagtggctcatgcctataatcctaacactttgggaggccgaggcgagcagattgcctgagctgaagagttcgagaccagcctgggcaatatggtgaaaccccgtttctactaaaatacaaaaaaaaaaaaattagccaggcgtggcagcgtgcgcctgtagtccccgcgacttggaggctgatgcaggagaatcgctttaacccgggaggcagaggttgcagtgagccgagatcgagccactgtactccagactgggtgacagagcgacactctgtctcaaaaaaaaaaaaaagatttaactgccccactggattttggaattgcaggggaccttcagccccttcgtttgtccagtttctcccatttggaatgggtatatccaacgcctgtaccccattgtatataggaagtaactaacttgcttttgattttacaggctcacagaagggacgtgccttgtctcagatgagattttggactgtggacttttgagttaatgctgaaatgagttaagactttgggggatagttaggaaggcatgactagtttgaggacattatactcaatgaaataagccagtcaaaaaggaaaaatatgtattgtataaactaacttacattaatctaccacataggattaaaactgttcacaggaatataaaatagaattttttagata

SEQ ID NO: 970 - protein, 303 aa, Homo sapiens
MKGKEEKEGGARLGAGGGSPEKSPSAQELKEQGNRLFVGRKYPEAAACYGRAITRNPLVAVYYTNRALCYLKMQQHEQALADCRRALELDGQSVKAHFFLGQCQLEMESYDEAIANLQRAYSLAKEQRLNFGDDIPSALRIAKKKRWNSIEERRIHQESELHSYLSRLIAAERERELEECQRNHEGDEDDSHVRAQQACIEAKHDKYMADMDELFSQVDEKRKKRDIPDYLCGKISFELMREPCITPSGITYDRKDIEEHLQRVGHFDPVTRSPLTQEQLIPNLAMKEVIDAFISENGWVEDY

SEQ ID NO: 971 - DNA, 897 bp, Homo sapiens
  source 1..897: mol_type = genomic DNA
atggacaggagctcgctgctgcagctcatccaggagcagcagctggaccccgagaacacaggcttcatcggtgcggacaccttcactggcctggtgcacagccatgagctgcccctggacccggccaagctggacatgctggtggccctggctcagagcaacgagcagggccaggtctgctaccaggagctggtggacctgatcatcgtgttcctgtgttacggggcccgcctcaacaagtgggtgctgcagacctaccaccccgagtacatgaagagcccccttgtgtaccaccccgggcaccgtgcccgcgcctggcgcttcctcacctacatgttcatgcacgttgggctggagcagctggggttcaacgccctcctgcagctgatgatcggggtgcccctggagatggtgcacggcctgctccgcatcagcctgctctacctggcaggcgtgctggcaggctccctaaccgtctccatcaccgacatgcgggccccggtggtgggaggctccggcggggtctacgccctgtgctcggcacacctggccaacgttgtcatgaactgggctgggatgagatgtccctacaagttgctgaggatggtgctggccttggtgtgcatgagctccgaggtgggccgggccgtgtggctgcgcttctccccgccgctgcccgcctcgggcccacagcccagcttcatggcgcacctggcaggcgcggtggtgggggtgagcatgggcctgaccatcctgcggagctacgaggagcgcctgcgggaccagtgcggctggtgggtggtgctgctggcctacggcaccttcctgctcttcgccgtcttctggaacgtcttcgcctacgacctgctgggcgcccacatccccccaccgccctga

SEQ ID NO: 972 - DNA, 2392 bp, Homo sapiens
  source 1..2392: mol_type = genomic DNA
ggagctgggccgggcccgagcggatcgcgggctcgggctgcggggctccggctgcgggcgctgggccgcgaggcgcggagcttgggagcggagcccaggccgtgccgcgcggcgccatgaagggcaaggaggagaaggagggcggcgcacggctgggcgctggcggcggaagccccgagaagagcccgagcgcgcaggagctcaaggagcagggcaatcgtctgttcgtgggccgaaagtacccggaggcggcggcctgctacggccgcgcgatcgtgagtgcgcccgcgcggggagggcggcggcggtggcaccggggagggccgggcccgggcccggccggccccaccgagggtctggctcctcttcggggcgtgtcctcggctcccaaagcccagccgtggttctcgagcccagcgccgggtgccggagaacgagggtgcgatgctggatggaggccggccgggtggggggagggcaggggccctcgacccttgaggaccccaggtcctaagcccggactctccaaagatttggaaaactttacaaaaccaagtggaatcaagcggataggctcagccagtactccactgtgcacagatccttggacccaggggctttgacaactgagaaacctagtttcttgattctagccagagcgcagaagctgggacgggccgtgggtcagagtgggcacgctgagcctacgccctcatgcggctggcccggccttggtccctagacccggaacccgctggtggccgtgtattacaccaaccgggccttgtgctacctgaagatgcagcagcacgagcaggccctggccgactgccggcgcgccctggagctggacgggcagtctgtgaaggcgcacttcttcctggggcagtgccagctggagatggagagctatgatgaggccatcgccaatctgcagcgaggttggctgacaagctgcccggttgtggggcctctggggccaggcgggtggactggccagagagtgacgtgaagcccccgttccccagcttacagcctggccaaggagcagcggctgaacttcggggacgacatccccagcgctcttcgaatcgcgaagaagaagcgctggaacagcattgaggagcggcgcatccaccaggagagcgagctgcactcctacctctccaggctcattgccgcggagcgtgagaggtgggaccctcaccccaggccgccctgtcttgggataattctgaatcaccgactcccgacacaagcgtttatcgaaggctttactggcaagcaggaaatgtggggaagtgtggatgttagctctgagattggggtgtggtcagacatctggccaggtccatctctgaccggctcctggtcaacccccagggagctggaagagtgccagcgaaaccacgagggtgatgaggacgacagccacgtccgggcccagcaggcctgcattgaggccaagcacgtgagggtgccccccacccacatgtgggtctgtgtgtgtgcacgtggcgtgggagcatccccgccttgtgttgggtctgtgccccatggaggagggaggtggggtgtctcccccaagcacagcactcaactcttcacaggacaagtacatggcggacatggacgagcttttttctcaggtggatgagaagaggaaggtgagtgtgtgtcgcttgctgccgatggctggcaggtgctcgtgcagtgccccttttcagcctctgaccgtgtgcccctgtgccacagaagcgagacatccccgactacctgtgtggcaagatcagctttgagctgatgcgggagccgtgcatcacgcccagtggcatcacctacgaccgcaaggacatcgaggagcacctgcaggtgaggcctgcggctgggggagcagggccagtggcatggtcctgggccccatgactgccctctgcccttcttgtcactgcagcgtgtgggtcattttgaccccgtgacccggagccccctgacccaggaacagctcatccccaacttggctatgaaggaggttattgacgcattcatctctgagaatggctgggtggaggactactgaggttccctgccctacctggcgtcctggtccaggggagccctgggcagaagcccccggcccctatacatagtttatgttcctggccaccccgaccgcttcccccaagttctgctgttggactctggactgtttcccctctcagcatcgcttttgctgggccgtgatcgtccccctttgtgggctggaaaagcaggtgagggtgggctgggctgaggccattgccgccactatctgtgtaataaaatccgtgagcacgaggtgggacgtgctggtgtgtgaccggcagtcctgccagctgttttggctagccga

SEQ ID NO: 973 - protein, 119 aa, Homo sapiens
MSRSVALAVLALLSLSGLEAIQRTPKIQVYSRHPAENGKSNFLNCYVSGFHPSDIEVDLLKNGERIEKVEHSDLSFSKDWSFYLLYYTEFTPTEKDEYACRVNHVTLSQPKIVKWDRDM

SEQ ID NO: 974 - DNA, 9199 bp, Homo sapiens
  source 1..9199: mol_type = genomic DNA
catgtcataaatggtaagtccaagaaaaatacaggtattcccccccaaagaaaactgtaaaatcgacttttttctatctgtactgttttttattggtttttaaattggttttccaagtgagtaaatcagaatctatctgtaatggattttaaatttagtgtttctctgtgatgtagtaaacaagaaactagaggcaaaaatagccctgtcccttgctaaacttctaaggcacttttctagtacaactcaacactaacatttcaggcctttagtgccttatatgagtttttaaaagggggaaaagggagggagcaagagtgtcttaactcatacatttaggcataacaattattctcatattttagttattgagagggctggtagaaaaactaggtaaataatattaataattatagcgcttattaaacactacagaacacttactatgtaccaggcattgtgggaggctctctcttgtgcattatctcatttcattaggtccatggagagtattgcattttcttagtttaggcatggcctccacaataaagattatcaaaagcctaaaaatatgtaaaagaaacctagaagttatttgttgtgctccttggggaagctaggcaaatcctttcaactgaaaaccatggtgacttccaagatctctgcccctccccatcgccatggtccacttcctcttctcactgttcctcttagaaaagatctgtggactccaccaccacgaaatggcggcaccttatttatggtcactttagagggtaggttttcttaatgggtctgcctgtcatgtttaacgtccttggctgggtccaaggcagatgcagtccaaactctcactaaaattgccgagccctttgtcttccagtgtctaaaatattaatgtcaatggaatcaggccagagtttgaattctagtctcttagcctttgtttcccctgtccataaaatgaatgggggtaattctttcctcctacagtttatttatatattcactaattcattcattcatccatccattcgttcattcggtttactgagtacctactatgtgccagcccctgttctagggtggaaactaagagaatgatgtacctagagggcgctggaagctctaaagccctagcagttactgcttttactattagtggtcgtttttttctcccccccgccccccgacaaatcaacagaacaaagaaaattacctaaacagcaaggacatagggaggaacttcttggcacagaactttccaaacactttttcctgaagggatacaagaagcaagaaaggtactctttcactaggaccttctctgagctgtcctcaggatgcttttgggactatttttcttacccagagaatggagaaaccctgcagggaattcccaagctgtagttataaacagaagttctccttctgctaggtagcattcaaagatcttaatcttctgggtttccgttttctcgaatgaaaaatgcaggtccgagcagttaactggctggggcaccattagcaagtcacttagcatctctggggccagtctgcaaagcgagggggcagccttaatgtgcctccagcctgaagtcctagaatgagcgcccggtgtcccaagctggggcgcgcaccccagatcggagggcgccgatgtacagacagcaaactcacccagtctagtgcatgccttcttaaacatcacgagactctaagaaaaggaaactgaaaacgggaaagtccctctctctaacctggcactgcgtcgctggcttggagacaggtgacggtccctgcgggccttgtcctgattggctgggcacgcgtttaatataagtggaggcgtcgcgctggcgggcattcctgaagctgacagcattcgggccgagatgtctcgctccgtggccttagctgtgctcgcgctactctctctttctggcctggaggctatccagcgtgagtctctcctaccctcccgctctggtccttcctctcccgctctgcaccctctgtggccctcgctgtgctctctcgctccgtgacttcccttctccaagttctccttggtggcccgccgtggggctagtccagggctggatctcggggaagcggcggggtggcctgggagtggggaagggggtgcgcacccgggacgcgcgctacttgcccctttcggcggggagcaggggagacctttggcctacggcgacgggagggtcgggacaaagtttagggcgtcgataagcgtcagagcgccgaggttgggggagggtttctcttccgctctttcgcggggcctctggctcccccagcgcagctggagtgggggacgggtaggctcgtcccaaaggcgcggcgctgaggtttgtgaacgcgtggaggggcgcttggggtctgggggaggcgtcgcccgggtaagcctgtctgctgcggctctgcttcccttagactggagagctgtggacttcgtctaggcgcccgctaagttcgcatgtcctagcacctctgggtctatgtggggccacaccgtggggaggaaacagcacgcgacgtttgtagaatgcttggctgtgatacaaagcggtttcgaataattaacttatttgttcccatcacatgtcacttttaaaaaattataagaactacccgttattgacatctttctgtgtgccaaggactttatgtgctttgcgtcatttaattttgaaaacagttatcttccgccatagataactactatggttatcttctgcctctcacagatgaagaaactaaggcaccgagattttaagaaacttaattacacaggggataaatggcagcaatcgagattgaagtcaagcctaaccagggcttttgcgggagcgcatgccttttggctgtaattcgtgcatttttttttaagaaaaacgcctgccttctgcgtgagattctccagagcaaactgggcggcatgggccctgtggtcttttcgtacagagggcttcctctttggctctttgcctggttgtttccaagatgtactgtgcctcttactttcggttttgaaaacatgagggggttgggcgtggtagcttacgcctgtaatcccagcacttagggaggccgaggcgggaggatggcttgaggtccgtagttgagaccagcctggccaacatggtgaagcctggtctctacaaaaaataataacaaaaattagccgggtgtggtggctcgtgcctgtggtcccagctgctccggtggctgaggcgggaggatctcttgagcttaggcttttgagctatcatggcgccagtgcactccagcgtgggcaacagagcgagaccctgtctctcaaaaaagaaaaaaaaaaaaaaagaaagagaaaagaaaagaaagaaagaagtgaaggtttgtcagtcaggggagctgtaaaaccattaataaagataatccaagatggttaccaagactgttgaggacgccagagatcttgagcactttctaagtacctggcaatacactaagcgcgctcaccttttcctctggcaaaacatgatcgaaagcagaatgttttgatcatgagaaaattgcatttaatttgaatacaatttatttacaacataaaggataatgtatatatcaccaccattactggtatttgctggttatgttagatgtcattttaaaaaataacaatctgatatttaaaaaaaaatcttattttgaaaatttccaaagtaatacatgccatgcatagaccatttctggaagataccacaagaaacatgtaatgatgattgcctctgaaggtctattttcctcctctgacctgtgtgtgggttttgtttttgttttactgtgggcataaattaatttttcagttaagttttggaagcttaaataactctccaaaagtcataaagccagtaactggttgagcccaaattcaaacccagcctgtctgatacttgtcctcttcttagaaaagattacagtgatgctctcacaaaatcttgccgccttccctcaaacagagagttccaggcaggatgaatctgtgctctgatccctgaggcatttaatatgttcttattattagaagctcagatgcaaagagctctcttagcttttaatgttatgaaaaaaatcaggtcttcattagattccccaatccacctcttgatggggctagtagcctttccttaatgatagggtgtttctagagagatatatctggtcaaggtggcctggtactcctccttctccccacagcctcccagacaaggaggagtagctgccttttagtgatcatgtaccctgaatataagtgtatttaaaagaattttatacacatatatttagtgtcaatctgtatatttagtagcactaacacttctcttcattttcaatgaaaaatatagagtttataatattttcttcccacttccccatggatggtctagtcatgcctctcattttggaaagtactgtttctgaaacattaggcaatatattcccaacctggctagtttacagcaatcacctgtggatgctaattaaaacgcaaatcccactgtcacatgcattactccatttgatcataatggaaagtatgttctgtcccatttgccatagtcctcacctatccctgttgtattttatcgggtccaactcaaccatttaaggtatttgccagctcttgtatgcatttaggttttgtttctttgttttttagctcatgaaattaggtacaaagtcagagaggggtctggcatataaaacctcagcagaaataaagaggttttgttgtttggtaagaacataccttgggttggttgggcacggtggctcgtgcctgtaatcccaacactttgggaggccaaggcaggctgatcacttgaagttgggagttcaagaccagcctggccaacatggtgaaatcccgtctctactgaaaatacaaaaattaaccaggcatggtggtgtgtgcctgtagtcccaggaatcacttgaacccaggaggcggaggttgcagtgagctgagatctcaccactgcacactgcactccagcctgggcaatggaatgagattccatcccaaaaaataaaaaaataaaaaaataaagaacataccttgggttgatccacttaggaacctcagataataacatctgccacgtatagagcaattgctatgtcccaggcactctactagacacttcatacagtttagaaaatcagatgggtgtagatcaaggcaggagcaggaaccaaaaagaaaggcataaacataagaaaaaaaatggaaggggtggaaacagagtacaataacatgagtaatttgatgggggctattatgaactgagaaatgaactttgaaaagtatcttggggccaaatcatgtagactcttgagtgatgtgttaaggaatgctatgagtgctgagagggcatcagaagtccttgagagcctccagagaaaggctcttaaaaatgcagcgcaatctccagtgacagaagatactgctagaaatctgctagaaaaaaaacaaaaaaggcatgtatagaggaattatgagggaaagataccaagtcacggtttattcttcaaaatggaggtggcttgttgggaaggtggaagctcatttggccagagtggaaatggaattgggagaaatcgatgaccaaatgtaaacacttggtgcctgatatagcttgacaccaagttagccccaagtgaaataccctggcaatattaatgtgtcttttcccgatattcctcaggtactccaaagattcaggtttactcacgtcatccagcagagaatggaaagtcaaatttcctgaattgctatgtgtctgggtttcatccatccgacattgaagttgacttactgaagaatggagagagaattgaaaaagtggagcattcagacttgtctttcagcaaggactggtctttctatctcttgtactacactgaattcacccccactgaaaaagatgagtatgcctgccgtgtgaaccatgtgactttgtcacagcccaagatagttaagtggggtaagtcttacattcttttgtaagctgctgaaagttgtgtatgagtagtcatatcataaagctgctttgatataaaaaaggtctatggccatactaccctgaatgagtcccatcccatctgatataaacaatctgcatattgggattgtcagggaatgttcttaaagatcagattagtggcacctgctgagatactgatgcacagcatggtttctgaaccagtagtttccctgcagttgagcagggagcagcagcagcacttgcacaaatacatatacactcttaacacttcttacctactggcttcctctagcttttgtggcagcttcaggtatatttagcactgaacgaacatctcaagaaggtataggcctttgtttgtaagtcctgctgtcctagcatcctataatcctggacttctccagtactttctggctggattggtatctgaggctagtaggaagggcttgttcctgctgggtagctctaaacaatgtattcatgggtaggaacagcagcctattctgccagccttatttctaaccattttagacatttgttagtacatggtattttaaaagtaaaacttaatgtcttccttttttttctccactgtctttttcatagatcgagacatgtaagcagcatcatggaggtaagtttttgaccttgagaaaatgtttttgtttcactgtcctgaggactatttatagacagctctaacatgataaccctcactatgtggagaacattgacagagtaacattttagcagggaaagaagaatcctacagggtcatgttcccttctcctgtggagtggcatgaagaaggtgtatggccccaggtatggccatattactgaccctctacagagagggcaaaggaactgccagtatggtattgcaggataaaggcaggtggttacccacattacctgcaaggctttgatctttcttctgccatttccacattggacatctctgctgaggagagaaaatgaaccactcttttcctttgtataatgttgttttattcttcagacagaagagaggagttatacagctctgcagacatcccattcctgtatggggactgtgtttgcctcttagaggttcccaggccactagaggagataaagggaaacagattgttataacttgatataatgatactataatagatgtaactacaaggagctccagaagcaagagagagggaggaacttggacttctctgcatctttagttggagtccaaaggcttttcaatgaaattctactgcccagggtacattgatgctgaaaccccattcaaatctcctgttatattctagaacagggaattgatttgggagagcatcaggaaggtggatgatctgcccagtcacactgttagtaaattgtagagccaggacctgaactctaatatagtcatgtgttacttaatgacggggacatgttctgagaaatgcttacacaaacctaggtgttgtagcctactacacgcataggctacatggtatagcctattgctcctagactacaaacctgtacagcctgttactgtactgaatactgtgggcagttgtaacacaatggtaagtatttgtgtatctaaacatagaagttgcagtaaaaatatgctattttaatcttatgagaccactgtcatatatacagtccatcattgaccaaaacatcatatcagcattttttcttctaagattttgggagcaccaaagggatacactaacaggatatactctttataatgggtttggagaactgtctgcagctacttcttttaaaaaggtgatctacacagtagaaattagacaagtttggtaatgagatctgcaatccaaataaaataaattcattgctaacctttttcttttcttttcaggtttgaagatgccgcatttggattggatgaattccaaattctgcttgcttgctttttaatattgatatgcttatacacttacactttatgcacaaaatgtagggttataataatgttaacatggacatgatcttctttataattctactttgagtgctgtctccatgtttgatgtatctgagcaggttgctccacaggtagctctaggagggctggcaacttagaggtggggagcagagaattctcttatccaacatcaacatcttggtcagatttgaactcttcaatctcttgcactcaaagcttgttaagatagttaagcgtgcataagttaacttccaatttacatactctgcttagaatttgggggaaaatttagaaatataattgacaggattattggaaatttgttataatgaatgaaacattttgtcatataagattcatatttacttcttatacatttgataaagtaaggcatggttgtggttaatctggtttatttttgttccacaagttaaataaatcataaaacttgatgtgttatctcttatatctcactcccactattacccctttattttcaaacagggaaacagtcttcaagttccacttggtaaaaaatgtgaaccccttgtatatagagtttggctcacagtgtaaagggcctcagtgattcacattttccagattaggaatctgatgctcaaagaagttaaatggcatagttggggtgacacagctgtctagtgggaggccagccttctatattttagccagcgttctttcctgcgggccaggtcatgaggagtatgcagactctaagagggagcaaaagtatctgaaggatttaatattttagcaaggaatagatatacaatcatcccttggtctccctgggggattggtttcaggaccccttcttggacaccaaatctatggatatttaagtcccttctataaaatggtatagtatttgcatataacctatccacatcctcctgtatactttaaatcatttctagattacttgtaatacctaatacaatgtaaatgctatgcaaatagttgttattgtttaaggaataatgacaagaaaaaaaagtctgtacatgctcagtaaagacacaaccatccctttttttccccagtgtttttgatccatggtttgctgaatccacagatgtggagcccctggatacggaaggcccgctgtactttgaatgacaaataacagatttaaa

SEQ ID NO: 975 - protein, 250 aa, Homo sapiens
MVAGSDAGRALGVLSVVCLLHCFGFISCFSQQIYGVVYGNVTFHVPSNVPLKEVLWKKQKDKVAELENSEFRAFSSFKNRVYLDTVSGSLTIYNLTSSDEDEYEMESPNITDTMKFFLYVLESLPSPTLTCALTNGSIEVQCMIPEHYNSHRGLIMYSWDCPMEQCKRNSTSIYFKMENDLPQKIQCTLSNPLFNTTSSIILTTCIPSSGHSRHRYALIPIPLAVITTCIVLYMNGILKCDRKPDRTNSN

SEQ ID NO: 976 - DNA, 1086 bp, Homo sapiens
  source 1..1086: mol_type = genomic DNA
gaacttagggctgcttgtggctgggcactcgcgcagaggccggcccgacgagccatggttgctgggagcgacgcggggcgggccctgggggtcctcagcgtggtctgcctgctgcactgctttggtttcatcagctgtttttcccaacaaatatatggtgttgtgtatgggaatgtaactttccatgtaccaagcaatgtgcctttaaaagaggtcctatggaaaaaacaaaaggataaagttgcagaactggaaaattctgaattcagagctttctcatcttttaaaaatagggtttatttagacactgtgtcaggtagcctcactatctacaacttaacatcatcagatgaagatgagtatgaaatggaatcgccaaatattactgataccatgaagttctttctttatgtgcttgagtctcttccatctcccacactaacttgtgcattgactaatggaagcattgaagtccaatgcatgataccagagcattacaacagccatcgaggacttataatgtactcatgggattgtcctatggagcaatgtaaacgtaactcaaccagtatatattttaagatggaaaatgatcttccacaaaaaatacagtgtactcttagcaatccattatttaatacaacatcatcaatcattttgacaacctgtatcccaagcagcggtcattcaagacacagatatgcacttatacccataccattagcagtaattacaacatgtattgtgctgtatatgaatggtattctgaaatgtgacagaaaaccagacagaaccaactccaattgattggtaacagaagatgaagacaacagcataactaaattattttaaaaactaaaaagccatctgatttctcatttgagtattacaatttttgaacaactgttggaaatgtaacttgaagcagctgctttaagaagaaatacccactaacaaagaacaagcattagttttggctgtcatcaacttattatatgactaggtgcttgctttttttgtcagtaaattgtttttactgatgatgtagatacttttgtaaataaatgtaaatatgtacacaagtga

SEQ ID NO: 977 - protein, 427 aa, Homo sapiens
MSRSKRDNNFYSVEIGDSTFTVLKRYQNLKPIGSGAQGIVCAAYDAILERNVAIKKLSRPFQNQTHAKRAYRELVLMKCVNHKNIIGLLNVFTPQKSLEEFQDVYIVMELMDANLCQVIQMELDHERMSYLLYQMLCGIKHLHSAGIIHRDLKPSNIVVKSDCTLKILDFGLARTAGTSFMMTPYVVTRYYRAPEVILGMGYKENVDLWSVGCIMGEMVCHKILFPGRDYIDQWNKVIEQLGTPCPEFMKKLQPTVRTYVENRPKYAGYSFEKLFPDVLFPADSEHNKLKASQARDLLSKMLVIDASKRISVDEALQHPYINVWYDPSEAEAPPPKIPDKQLDEREHTIEEWKELIYKEVMDLEERTKNGVIRGQPSPLGAAVINGSQHPSSSSSVNDVSSMSTDPTLASDTDSSLEAAAGPLGCCR

SEQ ID NO: 978 - skipped

SEQ ID NO: 979 - DNA, 32767 bp, Homo sapiens
  source 1..32767: mol_type = genomic DNA
ctctgttactcagccgagcggccgaggccggacgacgcggcttggattgcggagccgcgagcagcgctgggtaacggccgcggcgaccaccccggacggcccctgtccccgctggcgggcttccctgtcgccgttcgctgcgctgccgggtgagtgcggcggacgccgcagggccgggacggcaggcggccccgtcgtgtttatgttattgtgccgctgccgccgccgccgccttctcctcagccgtaaccccctcctgggagtgggggcgggagcgcgcggtgggcgggggcggcgcgggaacaatagcggcgcggaggcgggggccagccgagggggcgtggggctgcgggacctgggtgcgctccgctgcccgccagcccgcctgccgccgcgagccccgcccgcctgtcctctcgcgtcctcttcgcgtgggtcctgcctccgcggcgggagaagaaaatggagcgggggggtgggtggcaagttctgaaacacttcggcaagggtcggacggaggtgtctttgcggcccgccgcgccctggctgcctccggggcggcggggagccggggagagcgcttctgccggcaggtccccaagcctgccccgcgcccatagggaccgtattttgcttctcgatgctttctttgtgctaacgttctgggcgaacgcaggcagcagcgctgaaaagggccagagtggcctgcagctctgggctgcagggcagagagcccaggcccgtggctcgggtgggaggtgtccatccagcttggcccgagcttcggtggtcagcgcgcatttctcttgagggtcatcggtggtgaccttttgactttttcaccccaccctcccatctctttgtctcgcatttgtgttcccgattcagagatggtagaaccaagtccattttaaagtaccctgatgaacactttccgtttttatttctgaaagttccctgcttggtctttactgcgaatttaataacatgttgactacatggcattgtccagtgattactatttttacctctgaaatccagcgatctttccagtagaattctggtccgtcagtccattgtgttttgagataagcatccagcaagtacctccttggcaattagaacatctgttttttcattcattcattcattcagcagctgtttagtaccgtactcagatgaagaggtttggtgtgaaggtaaagtatcctttcatggaagaggatgctttgactgaagtataatagatggacctttaaatgagacagttacataagtgatgtctgttaaggaaggtatggttatattctgggtcattttttaagcagtatatctggaagttcaagtgtaataggaagtagaattagatttggtctaaatatacaacagcttttatttatttctaaattttattttttccagtcttgcagccttacagtcatttgtaatggttacctcagattcccctgctgtggttaacgttaaacctaggaggtcagatgctctaagtgaacatgtttagtgctgtgcctgacaaaagcaagcaatcaaaatgggacttccttgagggcaggcctgtcttgcatctgtttctccaccacctagcctggaatatagtaagtgttcaataaaagtcggattgatgaaaagctctttgtaattgataatatttaaaatcaagccttaaaaaaaaccgtaatgttctccataaagttttggaagcttcatgcaactgtcgcatcagatggctaaatggtcagttcatgtacattatctgttatgatgacatgggcttttgaatcacgtgtaggtcattcactgtcctaaaataaaatcttgtctaaatatttttttaatatgataaataaagtaggttgtggagtgtgtgtttctgtgtatgtgctagtttatgtgtgtccgtgtgtgtgcatgtacgtaatccacacacaggcactcataaactggtatttcagtaggggtctaaaatgattgcatttataattttgtgaatattatttgaaagttttttggtgactcttattgtggaaaattgaggacaaaaccacataaatgttttattagaaatatttctaatattttagaaatgtttacttgaaatgtttggttttaagttctaacttgtattaacacaattggtacaaaatatgagcctaaaactcaaaataattgatttatcgaagttaaagctcttttccacttactaaatacagtttagcgtttgttttgtatttgaaagaatatgaaatgagttaactaatgagtttcttattatttgctgtaaagtggaaatgaagaaataagaaaataatacttttttaagatgatggttgaaaatctttgagataccaaagttttattgctttacctagttagggtatgtcagattctagtaggggttactgacaatcctttggcagtagctcacaggctgtgtaaagaaccagagttgtgttactttgttttccaaattgttggtttttaaaaatagctttattgcaatttaattgacataaaattcaccagttagagtgtatatatttcggtttttagtattttcacagtgttgtgccttgatcaccatcactaattccagaacattgtcatcaccccaagaagaaacaccatatccattagcagtcactctgaatttcacttcaaattatcctttaaagtaagagatatagcatcgattctgttagtaaatatattcctttagtaagtatgaaaagggctccttttaaatgtcctgtcctggcagaataggaaactatatccttcatactcctttagatcctgggggaaatgccatttggaaaggaagtcagtgcaagaataaattgtatacaaattaatgtggttataatcttaactatttgctccatgcctgatattatcaaagtgaccttgtgaggatgagatgttcagtgaaacaacttgaaggaatttgttgttaaatgactagtccccaactatcctagtgctaagaggttgttgaataggagcctgcttcttgttggtctgctttgccagcgggttgaattttgacatatttcagtcatctacatggttgagatgctttgttgcacgagtggaaatacaaaataatgtctgacattaggattccagtgctctagaggtctctggtcaagtcaatggtatgggtagtagcttttctgattcatgtggtccaaggaagtcattataaccacatagctttatatatgaatcatttgcctatgtcagtgaactgtgatgctgattgtcttaatcatgagctctttacctgaacatttagaagccttgcattcttactcttaatgcaggttaagttgaactttgatttcagaagtgagttgactgaaaggtaacaggagtattgaaatgagttatcctgtcattcaggtcaataggtggagctagagcaatccaggaatcagacctaggttcatttctcagttctgccatctggactttgtcatcaaattctggagctttaggcaagtgccttaatgtttttggctttaaaagtataaactgaggctgtcagaacttttttttatagaaggcttgttcctcagataggtggttcttgagaaaacatactaggacaaaaagagcccttcttgggtgataatcagaagcctaagttaagaacagtagtcaaagttaggattttgtaattttgtaattttcagaagccaaaaaaattgttgagttgaattttttctttaatatccagacttagaaaacaaatggaaggcttcaccataagctagagattcttggaaaggtaggcttttatttattccacagcatcatgccttctaatgagaccgtatgctcccagagactttgtggaagacataaaatgagttcattatcctcaggaagcttataatcaaggattagactgaaggcatcgctaaacagttaatttatgctcttttaaaaggtatatgaaagggttcccgccaaacaaaagcccacttcacatctctgtgcaggccaaatttcactgaaatccagtttttaaaattgtgtgtgtgtgtgtgtgtgtgtgtatgtgtgtatacgtatgtgcatggagagagacagagaggagacccctttttggaaaacttagtagcttccattctttttcttggaggtgggttatatcacaaatacaagagatacctgtgtttcctgttaccctttattatatttcagatttagttaaaatctgccattctttagaaagtcaaggaactcaaaccttacaatgattgctagcgtgggttttaaggtcagccctgagttctaatcgtgctccaatctaactgtggtataggctagttcaggttatataacatatttgggcctgttttattatctgtcaaatgagaataataatagcacgtaacctcatagggctgtgaggtttaaattaggtactgcatgtaaagtgcctggcactgttgtggtggctggaatgctagatacaagtattcaggtagtttttgctattgttatcacttatatttaactttgaacaaacataaaatgccaagtaaacgtcaaaccagtttaatgcacagtgtccattctaattctccagaatatgccatttgtttcactctgcatctctggggggtttatttaaaattcgatcatctcatgtaatctgaattgactgagatgatttatattaacatttggaccagtaatcctctctatcttaaaatttggaaatgttccagaagcaaatattgaagggaacatatttgccactttcacgattttttgccttttcccacaggagaaaattgcctaagctttcctaggtttgttatagacatctaaaggaatgagaatttaggagctacgaatagctttatcatgtgacacatttgaagaaaatggaatgctgtcacatcttttaaatttagtgttattgggatcttcgattctgtgaagattgcagatttgtcagagacctggtaaccacaacaattcattgaggcctggaggcctcttaaaaaatgagggagattatttattagtaccacttagaaatattatcttttctgtattttctgtggttttctaagtcttctgtttagcgtttctatgattataatggtggattaaatttcttgttccttctcaagagcatctactatgagatgacactggtttttacttcggcagtatttactgagcattgcactatactaatccaggtattcggtgatgtaggaaccaaaggaaatagaagtcagtttctaccctcagtgagctgagtataatttgatagaagataaggattaacgtaagcacatttatgtcctaacacaaggaagcaaatattgttagtcatttcattaggaatttcttttgtcattggggcatttggggccttccaaaccttacatctcttgccatgcctttgtactcactcgataaacctgagaaagcaagatatcttcttttctgattcctggtttaagttgagagtgtggtgcacattagtcaaaatccaaatcataagaaaaggcaaaccttatgaattcattttggaatacaacagggtatcaaaataagtatatgagaaatatgaaaagctgacagtagaaaagatgctactcaggtactaaccagagttctcaatctcctctgtattgaagctcttatgatgtaaggctggatctgtactagaaacactttttaaagtctctctccagtattgagaagtatagtcctccagtactgcctcttggtgctgagagactcaagcctgccacccaccatatttctggggaaactagaaacgaaaaatagccacacacaagcacttgctttgcttggcaggaaacatcaaaaccataagatgttatttcctaaaagtcattaattgggtagaaaaatcaccattttctgacttgttccaggaaggatggctttctgattttcagatgccattgggtcaaccaaaggtaagataaagaaaagctactgctgtgtggatttttctgtgacttgagaaagcgtcacttttcagttaaacaaaaaccaaagcatctagctttggctgttactattgagaatttaaaagtcttaatgttttaatttgtttacattttatattttgactaagtagtaatgaattcactttgactcaaaattccaaagatttaaaaagataaagaatctccttttctactctgtgtagccacctagttcttctgcctggaaactgttaaaattcctgtgaatacttccaaagatagtttatatatgtttaagtatataatcctttgttcaaaatccttggtccagatgtattttagaatgaaggctttttttgcagttgtggaaagataatgtagcacatctaccgtgttatccaaaatccctagtaagaggttgtagcctcatgattaaacacattaacatttctgtaaaaaatacagacataggccaggcgcggtggctcacgcctgtaatctgagcactttgggaggccgaggcgggcggatcacctgaggtcaggagtttgagaccagcttggccaacatagtgataccccgtctatactaaaaatacaaaaattagctgggcgtggtagcgtacgcctgtaatcccagctacttgggaggttgaggcaggagaatctcttgaatctaggaggcggaggttgcagtgagctgagatcgtgccactacactccagcctgggcggcagaggtgtagactctgtctcaaaaaacaacaacaacaacaacacccagaaataatcaaagacattaatatttttataaaagcataacaaatacaagtagggtgaataaagattataaaatcttatgctacgtctcgtcaggttttaccaccaaatacgtttgtactaaacttattttaaaaacgtatttttcacagctttatggattttggctttgccaatgaaggataggtgtcatacatatatacagtactgtatagcctctgctctgctccctccctttttatttaatgtaagttgttgcatgcaatatgtatcaccttttgcttttttgttttttgcttgttggtttgttttttgagacggagtctcactcttgttgcccaggctggagtgcagtggcacaatctcagctcactgccacctctgcctccgaggttcaggtgattctcctgcctcagcctcctgagtagctgggattacaggtgatccacctgccttggcctccaaagtgctgggattacgggtgtgagccaccgcacgtggcctgctttttgttttaatatagctgagagattattttatatcagtcatatcagtatgtaaatggcatgcttttttaacatctttgtggtattccatttgtcttactctgtttgggctgctatatcaaaataccataacttgagtggtttaaacaacagaaatttatttctcacagttctggaggtcgggaagttcaagattaggctacttagtcaatttggttccctggtgagggtccttttcctggctttataggtggccggcttctggatgtatcctcacatggcccctaagagctctagtctgttcctcatcctatcatgggggctccaccctcatgacctaatatagtcatgagaggcttagttaactcctaaaggtctctcctccagatactatcaagttagagggtaggccttcaacatatgaatttggagggacacagacagtccataacatcattatactggtataccatttaactcctttctgatgcatatttaggtagttttcagacttttgctatcaaaagccatggtgcagtggattaccttgtgcatacgtcgtgttgcacttaaatgcataggataaatttccagaggtagagttcctaggccagcgtatgtgcatttgtaattttatgtattgctgaagtgtagcctgtagaggttgtccaacttccattccaccagcactgtgtaaggatgcctgcttcttattacccttagacgtctttcatcttttaagggctgtttgtgttttctttcttttgaactgtccttgtctttgcatgtttttctattgctttgttgctcattttcctagatttgtaggattaattttacaaattggctccatgctattttttggaaatgtttttccccaatttgctgttttccattctatggtaggctattatgtatggttccaactttattttcttcaccagatatccatccatttgtccctacaccatttattaaataatccatctttgtcttaactgatttaaaatgccacctttaccatttacaaaatttccacgtgtatttggtaccattgtttccattgacccatctgcctgtttgggacctgagccatcctgtttttattattgtagtttatgctgtgttttctgctaggtctaattcccttttatttctcttccttttcagaagtttttttctggcttctatcttgtttattttatatgaacttctaaaaacaacccatctagtctagtctgtacccctcctctgccagtctttctgttggaatcactttttttattttattgtggtaaaattatgcacagctagatgcacaagcattacagtccaataagtttgcctttgtatacacttgtgcaatcccagatcaaaatacagaacacttccatcacccagaaccttttcttacatccttttcaagttaccttgctccccagtgattggcttctattaaatggattcagtgtactgttaggatttctttgtatttatagaataagtgacagctttatgatgtacctttatatccaagaataggaaaaacaaccttttcatttgttgaagtctcattttgagttcctgatagcatttttaaacattaaaatttttttttgctgttttatatatttaagtttttttttttttgctggaaatggcatctttttttccacttttatcttctatctggttatatataagaaagctttttattttgtatattagttaatatttcatatattaaataataagccccctgtagaatatttattatttctaatagttttgtagttgaattttttatttttcttatgtcatgccagcttttttgtttcctttgatttttacctcctccctcccccaactttttatactcttatattttttcttattgcatttatagtggtgattttagaagattatagttttcctccattatatgtaaaatgagccaaaatatctgtttatctgttgagtatttaaatgttatgaataataatgaaattagggagggattatgggaatacttaaagtagtgtgaagttttctctctaaagttaatgtaacttgaaatgaattgtggttttcaaaatgttaaatggacaagttggggatcacttgatagtgaatgtaggattagcagttaactgccttgtgtcttatttgatgatacagtcatgcaccacatggtgaggtttcggtccattacagaccacatatgtgacagtggtcccataaaattataccatatttttactctattttttctatgtttagatacacaaatacttcccattgtgttacagttgcctgcagtattcagtacagtaacctgctgtacaggttcgtagcctagggtcagtaggctacaccatattatagcttaggtatgttgtactatctaggttggtgtaagtagattccatgatgtttgcacagtgacgaaattgcctaatgatgcatttctcagaaggtatccccgtccttaagcaaggtgtgactatgtgtataggctgctttctatgtgcttagcacccagaggcagctcccggaaatataatttagtctggtgtcagagagcatgcagtcaaagtagaggtcaagatatgagaagtatgaagtgaatgaatgtagacaggagggtcttaagcttggaaaaatgcaaaaatcaagtcaggaaagcacaggagtgagagggtgcaaagagtgagtttgatttggcaactggattggggcaggttgctcatccttataaaattatatggtagttaggtacttagctgaacttcagtagagatctcattgcttaatggggattaaatagtttattttctgtctcttcttcccttcccctgctcccaccaaaaagctaaggcagttttctactgaaggacgcatacatcgttaagtaagctagaaacaaaaagttagaacctcgggaaaacaagtatccagactatcctaatggtataggagctaatgcatatttggtgcctatcatataccaggcactgttcttgtgctttatgtatgttaaattgtttaaacatcccacagcaaccctacaaggtgggcactgttactcccattttatacatgaggaaacaggcatagagagattatatgggaagttgttggtgatcttgttgggtggttttattaaagtgggaagaaagaagccaagttgaagatggttaaaaaacaatgaatgatttttctttttaaagacagggtctccctctgttgcccaggctggagtgcagtggtgtgatcgtagatcactgcagccttaaactcctgggttcaagtgaatcttcctgtctcagcctccagcctcccgagtagctgggactcggctggcgaatttttaagttttttgtaaagatggggtctcactgtgttgcctaggctggtctgaaactcctggcctcgtgatcttaccacctccgcctcccaaagtgctgggattataggcgtgagccaccacacccagcccctgaatgaaacactttgaaaaagagtgagaaatgagcaagtgctgacacagtgggtgcagaccactcttttaagattagctctgaagtgaacaaagaaatgggttggtggataaaggaaattgtgaggctcagaaaatgagtgaaaatggcattgctgtatgtaggaaaggggatgcagagtacgggtagagagtttggccctcagtagaggagagatcttttccatctaacaggaggaaatgcagaaaagttgtgtgcccttgcgaggaagtttggaagttggaaggtgaaggcctattctcctggctttcatcttctctgtggtttctgtttgctcaatgaagcatgagattcatacgggcagaaagggatgggagtttggggagtttgaagcagtttgccaagaagtattgattgttcatttaaggtttaaaatcttgaatttaaagtgatatcagtcagcctggttttgtgaccccccacccccccagcattatttagctgattagttacaggcacagattaaggcaggtagttgaatttacccagggtgagattttgccaggtgtattagagttctccagagaaacagcaaatcggagttataggtaggtagactgagattttaaggcatttgtttttgtgagggctggcaagtctgaaatctgtagggcaggcaggaaattcttggtcaggagttaatactgcagccttgaggcagaattttgtttttctcagggaaacttgtttttgctattaaagccttaccaagtgattggatgaggcctacccacggtatcaaggataagctcctgtacttaaacttgactgtttgtagatattaatcacatctacaaaataccttcacagcaactacattagtgtttgaataactgggtactacagactagccaaattgacacttaaaactaaccatcacaccagatcagttcaaaagaaggaaagggggacaagggaaataaggaccttttaactagaatgcttattgtgtggtggtggttgagtgtgtaactggccacagggtttgagtaagttaacttgaaagattgaatgccatggtcagagtggaatacctgaaagagagatttcacaagtatgacaattattgacattaataatgctcaggttaactttgggtgtgggcttccgaggtggaattcagagacaaatcctgaacgtgaggaggccaatgagttaaagagtctgaggtattaaaaaagggtcagtctgcatgcatggtgaaatcagcaactagtgaggggagtaagggtacgtactgtaaaccagttgtaatgtcctcaatgaataaggaagaattggagggaggctagacgaacaagaaaggttaaaggtagtgtaacaggctaagtttgcttgtcacaaattgggaatttcagaaggccaagtaaaggaattaggaggatgaagaattgagtcaaatggaggacgtacacagcagtgtggcagtgagaattcagagaataatagataaccagggagagctggattttttctggtgaccataagcagggatgtgaggtatgagaggattagtcctgatacaggagatggtggttatcacttttagtgttgtaggactctgtggcagtgctttcagactgttactcatgacccattagtaggttatagaattttgggagatcacaatttctgttacgttgttaaaagaaatgaaatagaaaataccatagtgtgtcatgtgtaataagggactaagaattttttaacggttttattgagatataattcacataccattatagttatctatttgaaatatacagctcaaagcttttttagtatattcctggaataatggagccatcatcacagcctaactttagaacatgtttgtcaccccagaaagtaacctcatactcactagcagtcactccccatttcttcacacacaccccctcctctccctggccctaaacagccacttacccactttcttctctatagttttgttcattctggctatctcttttttatttttttgagatgacgtcttgctctgttgcccaggctggagtgcagtggcgtgatcccggctctctacagcctccacctcccgggttcaagcaattctcctgcctcagcctcccgagtagctgcgattacaggtgcctgccactaggcctggctaatttttttgtatttttagtagaaacagggtttcaccatgttggccaggctgatcttgaactccttaccccaagtgatctacccacttcagcctccaaaagtgctgggattacaggtgtgagccactgcacccagcgcattctggatctctcatgtaagtggaatcatacactgtgcgatcttttgtgactggcttatttcacttagcatgatgtttttaaggttcatgtatcatgtatcagtacttcgtttctgtttttttttcttttctttttttttgagacagagtttcacccttgttgcccaggctggagtgcaatggcgtgatcttggctcactgcaacctctgccttcctggttcaagtgattctcctacctcagcctccccagtagttgggattacaggcgcatgccaccactgccagcttattttgtatttttggtagagatagggtttctccatgttggtcaggctggtgttgaactcctgacctcaggtgatcccccaccttggcctcccaagtgctgggatttcaggtgtgagccactgctcggccttttttttttttttttttttttttttttttttaaattagatcaggtcttgctctgtcaccctgttacccaggctggagtgcagtaccatgatcgtggctcactacaggctgaaactcctgggctgaagcaatcctcctgcctcagcctcttgagtagctgggaccacaggcacatgccaccacacctggctaattttaaattttttgtagaggcaggctctccctatgtttcccaggctggtcttgaactcctggcctcaagttatcctcccaccttgagctcccaaagtgctgctgagattagaggcatgaaccacagtgcctgaccttcatttctttttatggtgaaatattatttggttgtacgatatgccacattttatttacctacacttcatttgatgggcatttggattgtttacactttttggctatagtaagtaatatagtacacaagttatgaatatgaacatttgtacacaagtttttttgtgttgtatgttttcatttctcttgggtatgtatccaagagtggaattgctgggtcatatgggtaactctatgcttattattttgaagaactgccaaactgtttttcaaagtggctgcaccattttacatttccaccagcaaggtgtgaagattccaaattctccacatcctattcaagcttgttattgtctgtcttgaaaatagccacctgatgagagtgaagtgatagcccattgtgattttaaattgcacttccctgatagctaatgatattgaacatagtttcatgtgcttcttggccacttttatatcttctggagaagtatttcagattctttgcctattttaaaaattgagttatttatctttttattacgttgtaagagtttttttttttttttttttttttaagagatggggttcttgctctgtcacccatcctggagtgcagtgatgcaacctgggctcactgcagcctcaaactcttgtacacaaatgatcctccctccccagcctcacaagtagctaggaccacaggtgtgccctgctaatttttaaaattttttgtagagatggggtctcactgtgccgcctaggtgctgtaactcctgggctcaagtgatcctcccaccttggcctccaaaagtgctgggattacaaacatgagcttccttgcctggccaaagagttctttatatattatagatacaagttgcataacagatgtatggtttataaatattttctcctgtttcagaggtagtctttttactttcttgatggcatcatttgtagcacaaaaagttttaatttcaataaagaaatccaatgtatttgtttttcccttgtgcttttggaatcttttataagaagccaatgcttaactcaaggtcatgaagacaacttctgcattttcttctgagttttatagttttagctcttacatttaggtctgtgatccattttgagttaattttatggtgtatggtataaggaaggcatgtgaggtaattcttttgcatatagacatgcagttgtcctagctccatttgttgaaaatactgttctttcttaccaaattgtcttgggcattcttgaaaaaaaggcagatttatttctggactctgaattctattccattgatctatgtgtctattcttaggttcccacggtgtgttgattactgtagttcagaattttttgaaagttgtgtttcacatagatgtgtgagtatatttatatatagatacacacagaggtgtgtgtgtaatgggttatgttggaaaatgttggaaaacctatggtgtctccccattagttcactcgcttgtggcaacttagtggagtatgttccctctcaggtaatatacagagaagacaggttagagggtctgtctgtgagtgtatgaattccttttagattggatgactgatttttcttactttagtaaagttttcaagtgcatgtggactgaagggcagtaaggagggcatagaacagctatgggaattcctaaagaattcatcagagatgaatgtaacgattatggagtgaagtatttgaaattttgaagttagcagggttttgtactgtgccagtctttcatgatttaaaaaaaaaaacttttttgaatatattaagcatgtctgtgtcggataacttaagacattatataaggaaaattatatagataatttaaggtttgggaatgatgctatctccttctagagaggatttttgttgactttggcaggaggcaagctagtggcactagcaatcccgaatcatcttaatccagtcagagactatgatgtttcaaaactgggttccggagtctacgaaggctggtctattttatgttttatttacttctaggtatgaccccttggagttctagcataaagccagggatgttatcagccccacatgcccccaccctcacactttcttgggcccttaactccaatatttaatcctctctagtcatgtaaatctattgcaagttcaagctcagcttctcagccacgtctttggaattggcagatcccttcagggggagaaatggccccggatgccagactcccttatgagcttttccttactctcccagatcttggtcttcatgctttttcactaccttggcactctgatgccctcaaacaggttttttggttttgatttttaaaacattttttctggggacttgggcaggtgtccagtttttctagttgctctcagtacgataattggtttgaattatctagttcaccattttaaggaaagcgatttgttaggttgatcaaggtttatgtcataagattctctgtttgaaattgtagtatatgtggtttcagtttttcctgagggtaagattttgggtaccagtttctacagattatagaaattattagaaaagggggaaatagccttaggaatagaaatgggagggaaaatggcagagaaaactagatatttttgcaaagtttgggaaagataaaggtatagggtaacattttcatgtctattaggagtgtaaaagggcattcatgtatcaaaggcgctgacatatttgttgtaatgatattgtcataattaaaaggctgtagaatctaggtattgtgggggtggctttgagaagtatctacttagtcgtgttgaataaaatttttaaatttcgcagagaaaccctaggatactgagtcattaattgaaggagtcaactttggggctggacttatggttgtgtcttatagcagtataaatctgcgcagccagtagtatgtaagggattgcagaaagaatttaatttcatagaacccattattaatatgagagatacaaaatgatactgattttgatttagcatgccatcttcatttatgtatgaaaataaatgtaaggtcttaaagagtttttgtttttgattctctaagctattcccatacttcttaaatttcaaaattacaaagttttccatacatcttaatcattataattgaggaaaaatggtatatctttaatagccccttcttctcttgagaaaatgatagatactgggtgtatttcagaaggttttatcagcagagttttggttgatattttaaactttttgaggataggaattgtttagtaaaatgatgccctctcttttttggctccatcttccagtatatgtgtcataggaacctggtttaagttcagtgtgtttctttgttacacctgtcagtagaatcggctattactgttttttggttccttacaactgaacattttggtcaccgtcctcacccactttttaaagtgacttcattctcccacatcactcccaactgaagaatgttcagacatacacattgaaagaatattacggtaaacacctgtatacttcatttggatattgtggttgttagcttttttgtcatattcgtttatgtctctcctaaaagtaaacacattctcttacatatgtcatacttaagcccttaatatctagttcatattcaagttttgctaattattcccccaaaaggtcagtttgtgctgcaaccaggtactgtgatttctcacctagtttccatagctcttgtgaaggtgttttcgtgcatggatagtgttcaaattgatgtttctgttaggggacaatcactggagagtcctattcttccatcttattctgcccctctcctccaaaaaggtcaacttgtaactgcttttttcaaaccaatattcaatcagtttatgaaccacatttgatcgttgttgctttagtcacttatacaacagttgtcctgttttctagtttttttttttttttttacactcatgatattggcttcttgaagagaccaggccatttgtcatatagaatgtttcccatattttggatttgtctgattttcttgtagcaattaacttttatctcaattcccactgtatttcctaaagtagaagattgagcctaaagactggattatatttagtttttttttggcttagttactcctgtgtacgttatattgactcataacacaggcatcaggtggtttgcctaaagtgtgatcatttggtgttaaggtggtattcaccagatctatccattataacaatgggtttccccttgacaatcagcagatcagtgagatgacgttttggttccctttgaatatcctgttttccagcagccttttacctgtgtgttgagtctcttggtgagctttgaatcagttatttcatttgggcttgcaaatggtgtttttttgtttttctaaccctatcatccttttttttttgagatggagtcttgctctgtcacccaggctggagtgcagtggcacaatctctggtcactgcaacctccacctcctgggttcaagcgattctctcacctctgcctcccgagtagctgggactacaggcacgtgccaccatgcctggctaattttcatatttttagtagagatggggtttcaccatattggccaggctggtctcgaactcctgacctcaagtgatctgcccaccttggcctcccgcctgtcatccttcttgatcaattaatattaaccagctttcctctgttaagaagacctttccctcttgtcaactgggattgaactacagttcttcctaacaagatgagataaatgtttatttctcttcaatataccaactctttttaacataccaattttgaaaatttaaccaatttggagtagtcatcttcaaaaagtggcacataactttcagtctctctgtatcacagggatttttgtttttttcagaagttttatgatcatttcagtcattctttttaaaatagtcttcatttgtagaagttttagttttacagaaaaattgagtatatactacagtttccatataccccagacccaatttctcctataattaacatcgtatgtttgcatggcacatttattacaattagtgaaaagtattggtacattattaactaaaatccatagcttattcagcttttcttagtttttagctagtgtttttgttttgttttttcaagatcccatctggaataccacattacattttgttgtcatatctccttaggatttcttagctgtgagtttctcagatattcctttttgtgattaccttgactgctcaaatattttgtaggataccgttttattggaatttgatgtttttctcatttttagactggccttatgggtttctagaaggaaaatcacagaggtaaagcatcatttcatcacatcctgtcaagggtatgtactgttaacataatttatgacttgattttgactttgatcacctggctgaggtaatgtttgtctgatttttccattgtaaagttactcttttttcctccttttcatactgtaatactggggaaaggtgaccatgcacagcccacactttagggagttatgtcctgcttcttgatggcagagtatctacataaattattaatatttggaatccttctgtgcaggagatttttattttctcccatttagtaatttgttcagtcatttatatcagtatggactcatggttgcttattttatactttgggttatagtccaatactattaatacttaattttgctacacacattgtttcagatttggccattgggaacccctttagttagctcctgtgcctgtgacatacttccatcggtgtgggtgttttgtgagcacttactttctggcactgcaggatactcccagctcatcttgtatgttttctaccctagtcctgggatcagccgtttctctaaggagcactgtttcctttaattagaaaatggtattagaaacaaagatctaggtgcccttgttgctactgggatgttgtgttttaggtactctcagcagatagagcaaataaatatattcatatattagaaatatctgtatatctatgtgtctagagagagatataagtatttaatattatatatcagtatttatatgtgcataaatatttgtaaccatctgtatctatataagctaaacatgaattcttaatgtcttcaactctaatctattaccatacggatcattcctggtcctcccgttactgaccagtaaatttcctccaatagcgggaaacctgcctcccagcacacaccatttatttacttagttgttcaattccaacataggtcttatagcagtatcagaattgttaactcacacccaatggaaacagctgtatcaactaggagtgttttttgtttgtttgtttgttttttgttgttcaattcttcagaaatttctaagtggacaatcatgtcatctgcaaacagaaacagttttatttcttttcccccctccgtctgcatgccttttcttcccttttattgtcttattgcagtatttaggactttaggtatgatgttgaataggagtaatgggaggagacatttttgccttattcttgttcttggggggaaagtagtttttcaccattaagtactatgttcactgtagagggttttttgaggggagtagagtagatttttttaaaaaatcaaattgaggaaattcttctccattcttggttttctgaccgttttcatcatgagtggtgttagattttgtcagacgctttgtctgcatccattgatatgaccatttgatttatcttcattagcctgttgatgtggtggattagggttacattagtagattttagaaccagccttgcatacctgggataaatctctcctggttatggtgaataattccttttctacattattggattcaatttactaatattttgttgaggatttttgttacctgtgttcatgaaagatactggtctgtagctttcttttcttaccatctctttgttttattattattagagtaaggctgctcttttagaataagtcaggaaatgttccttctgtttttattttctgcaagagattgtagagaattggtatcacttttttccttaaatgtttggaataattcaccagtaaaactgttcaggcctggtgttttctgttttaaaaggttaataactgttgattcaattttctaatagatacagatctattcagattattgatatagtttctttaatagttaacaggtttgttcaggttatctgtttttctttgtgagaactttggtagattgtgtctttcacagaatattggcttatttcatcttactaaatttttggtgtacagagttgttcatagtattcctttgttgtacttttaatgtacttgggataagtaatgatgacccctcttccatttgttacattagtaatttgtgccttctctctttttcttcttttgttttttttgagacaaagagtctcactgtcacccaggctggaatgcagtggtgcgatcttggctcactgcaacctcagcctcctgggttcaagcgattttcctgcctcagccttccaagtagctgggattacaggtacatgccgccatgcccagctaatttttgtattttttagtagaaatggggatttcaccatgttggccagggtggtctcgaacttcttgattagtctggctagaggtttaacagttttatttatattttcaatgagccagcttttttttttttctttgtattttcctgtttttaatttcactgattttgactgtaattcttttttttcttctgctcactttaggtgttactctttttgatgatcagttgtctcacatttggccagtgagagtctcttgaggtggctgctgtgtccattttgatctgacctggttgatcgttgaatgcttccttgctttctggcaggataaaatgtatttcaacctgtacttatcttgccttaacctgggacactccttttctttaggaagttggcttcagtcttaattttatgtgattgctcacttctttcatctaaactttaaacagatttgacacattgagatcagcacttttgcctttttttggtagtcaacaagagcaactgaggtgtcctgttgatgctagtatttaatgtcttaaaacttgtcttaaaaacagaacattttcctgttcaatttatataagcaaaaagacactttaactgtatccagccaaactcttctatggcatctctgaaagtaatttatactttgccagtttgtacttttgctaagagatagttgaaaaccacacctttttaagaagttcagaaattgaggatgcggtattctgaattatctaatttgatttttctgcatctctacagttgtttcattacttagtaaagcgtttccaactttagcttcagggtttttcttttacttttaacaaatattatgtgccaacacttacaaatagtaactcatttaattattttaaccttgctggtagatatggttattctcctctctccctcatagatggggaaactcaggcaagatgaagttaagtaacttgcgcagggtcatacacgagtggcagggccagagtctgaatccagacagttggctccagacgccagactcctagccactgctttgtgctgcccctctttcctctgctagttaagtcgaaaaagttgtttgtgattctgcatcttgctttcctcttctcttattaattatagtataatgggtgtcactcttattaccataagccttagtatggcattgcgagcaccagttaattaagcaataacgttttgagatccctaattggaagaattcagagcggtgtattgctttgagttagttggccctttgctgcaactctggccatgagacaacgttatcttgaatagtgataatgtgtaaaaagatgaggcctcctttttttttaaaaaaaaaattaaattcatttagagtatgaattttaaagtagtgtagtcagtgatgatataagatcaaagaataagtgaaaacacttcataaggcacagagagctaaatgtgtgtaactgttttattggtgtacatagttactgctggaactacagaggaagaatcattattttatgggaagaacatatgttactggaaatcctagattcttagatcacaattctaaattccagttctttgatgtgttaacatagggtccattgcatcctatttactggtttatttttatccttgctctgcttcttcataattgtaattaagtaaaactttctggttccccaaggtcagggcatactctttttgaaaataatattaactactgctgatgagaggaagagagcaacaggaagcatttaaaaaaattttttttaaactaacggcaaatataaaatatttaggaaaaaggtaaagattaaaagtacctatagctagtaatattttggtgtacttctttttatgtattttgtgcacatgtgagagagatttatatacatgggtacacacatgtataatttgtaaggatacaaaaatcatattagcttacgttaattgaggactagagtactgataactgcttttatttaagtctaggaaatagattttgtttaaaagaaatgtattcttaatagagaaataatttttataaaataagagatttgcagcattgctttttttgtataagtatgctaagactgccatctctttatttaacaggaaggagttttaaactttaacttaataggaagatgtttcaggggttctctgaagtcaagaatgttttcatataatactagaagtgttatttgcctttttcatgtctgttctcaagagtttttctgaggccatgtgacttgccctgtgatgtggcaacagactgtatagaagcaaatgagagaacccagctgtctgaaattaagccagaccataaagggatttgcagaaatgtagaacaatgtgtgagaaacacattcacccgtccaaacccaatgaatggactcagagacatgaagaacagcggaagtgagactttcaatggcagtcttgcaagatcaggtgtctggtaggcaggcacacccggggcaggtacagcaggtaatttatctcctagcacgcaggtctcttccccagttcctcactggtcgagtactatggggttacagtcttcccggacgttgcctaagtttcattatcccccttaaaaggttatactccagtccccttccccccgtaactttcaatttcccaatagcaaaactttcttcccttttatgggctgacccctcctctacattctgatcacttatcatgactttataggtgcatgagccatgcaatttgtcacatccgcaggctgactgccagtacttagatttgtttctcggtctagaatggatggattgtcattggtgatgagtataggattgcattctaaattgtggcagttatttggcagggagcccttggacagatgtagtttattcttcaagggtctccagcttagagttacccaccccgtttactgtccaaccctgaaaatgggtagtctaccatacatcatcccagctgggtggggcaggatgatgctctactgtaacctgtatctggttcagggcaaaggtacttatctgcctgcgagagctatccctgattttccaaattcccacaaggtaagacctggcaggcatcaaatcttacagtctgggatgctactgtcttggttacactaattaccaacctcattggatagggaggagtcccctgccagtttccattttgaccttctgctttttgtatagtagcccatcccagccatattaacttcgagaaatggggccaacccatgttttctttttagatttttctcagagttaactttaagggttcctcagtgcactttccactggtcttttcccctcccttccagggtctcttttaccaatcccttgactcaaggatagtgagtccacccctgttcagctgtttgcacagctatcttagtggggaccttcccagcttgggtggagcttgtcttctttccaaatcttaatcagcaccaagttgccaggctggaagtggtgaaccgtgaactcaagaggtggcatttgagtcagaagtcctcttaacctaagggatgacagggtggaggatatggccagtatataatttcttaagcattgatccatggtttccatagtagggaggatctgtagctctgcccaaatatgggtgcccctataataactcatagggggataatcccaagtattttcttggggctgtcataatcctaaggagtactattgggagacatttggtccagggtattttagtttctagattagtttggtgattatgctttttgagagtttgattcattctttctacctttccagaggaagggggatgccaaggggtatgataatctcatctaatttgtaaaccttccataattccccttaacacccttgagataaagtggctcccattgtttgaatcaatattttctaccaggtcaaatctaggtacagtctgttctaatattattttgaccacattactggcagtggctgttggaaggggaaaggcttccacccagctggaaaggtgacctacgatcaccagtaaatatatcagtcttcctcctttgggcatttctgtgaaatctacttgaatgctttgaaatggtcttagtctgggaggtcttcctcctgtggcctgttttctgatcacctttttgtttatcctttgacaagttacgcaacttccacatacttgtttagcaggggtataaatccctgtacacccataccctgttgcatcatgcagagtcggggatccccaatgactccttttgtgtaatatagacgttagctctctcatcaggggtttacttatttttcttccatcgggaagtatccatctcatcttcagtttgagtgacccctatcctgtctaattcttctttcttctctctgataaactggggccttaatactaccttagggatgtctgggatcaggctaaatagtctaatttcttcctccagggaggcttgcttagcagcttcagctgcaaacctgtttgctacagcttctgtggtgttccctttctgaaaaccatttacatgaactatggctacctctgctggaagcaagaggctttctaaaacctgtttggccagttccaaatgtaccaattattttctcctgctatttattaggccccactctgtccagatttttccaaaagtgtgtaccactttggattttaagtaggcatacttaaattcagtgtatatagtgcctttttggccttcaaggagctttagggcctggttaagagcataataattcacaggtttgggctaaccagcaattaggtaatcttcctttctcacataaggagtgtttatttccatcaatgacaccatcactgttatgtcccttgccatctgtcactggagacagcccatccacaaacagccttatctcatcatgtagtagagcttccctaaggtctggtctaactttggtttggtattctatgatacctaagcagttatgatctgatgtctctttgttctcctctcctttccctagaaaactgtctggattcaggcaagtatttgttgttacgaccaagtcatctttttctagtaatacagcctcatattttagaatccgagaatcagttaaccatcttccagctctttgatttaatatattcctgactaggtgtggggtgcttactattagggccccaccaaaggttagctttctagtctcctctaccagcaggtctgtggcagctattgtttgcacacatttgggctacccttgagagacaggattgagaagcttggagacaaaagcagcaggttgccttttcccaccccatatttgagtgagcactccaagggccatgccctagtctactgttagaaacaggtggaatgggttctctaaagatgggagggccagggctgtaatgagggcctggtttagctctttcactgcctgaatttcttctgaggaccactgcaagtgatcaggttcctcttctaataacttgaccggccggatgcaacagggaaagaagaaggggtggggacacggggcagagccagtcctcctgtttggggcctgggcctaggaaagctaactaggggcaggaaaggggagccccaggctgtggatgcctctgcgggggaacgttgggtcagcaacggccagaggaaatcctaaggccaaacagtatctgtggcctccctacctttgggcatcttctggtcgccaatttgctgcaagtcacagctcccaaatctggttgtgcaggctccaaagcagtggagcctggcgcttctgccatctccacctcctggatctcagagctgctggatggctccacccaccacccgctgagctggccccacttggggctggcattggtggacagcatgttccgggcgcctctgctcctctttgctggggcctgcacctttcctggctgctgactcatagatgtcagagctgcaggacggctccacagaagccctgtgtttaggacacctcattagtgaaggagagtggagagtaaacccaagggactatccagaggaatgtcagatggagtctctttggctccctctttcctttgtcccctaagcctagaatttctgtttctcattttcagtcagtctctgtgtctgagcttttccctgtgtactcaactccccaactggaggtttcttgcacaccccgagaatcgctttgtctgtctctggccgtttccctcgcagaacggaactgcagattgggactctgcacttgccttatatctgggatacgtctcagtcacacacactcgacctccaaaaatgcccaaccaccaaggcagtacttagagtccaattttcctaccttggcttgtgcatgaggtttcctggttgctgcagtgcctgcttttctccgtatgtcacctccactgcctcctgaataacagtctcaggtttgtctatggcctttgcaaggagctgggacactcagacagagcgggccacctaaatcgggtgagattcatctcccttttcggccggagtctgactctacgcaggcataaagatcccagacgggcccccaagtttgtaagggaaacattcacccgtccaaacccaaataatggactcggagacatgaagaacagcggaagtaagacttttagtggcagtcttgcaagatctaggtgtctggtaggcacacacacccacggcagttacagcaggtaatttatctcctagcacgcaagtctctcccccatttcctcactggtcgagtactatggggttacaatcttcccagacgttgcctaagtttcattatcccccttataaggttataccccagtccccttcctcacttaagtttcgattttccgatagcaaaacttttccctttcatgggctgacccctcctctacattctgatcacttatagtgactttctaggtgcatgagctgtgtggtttgtcacatctgcaggttgactgccagtacttagatttagcatgccttgaaaatggatcatttaaaatgttttctcacacaatggcactcttttcaccaggttttccttttttttaaattgtcgttttccatcaaaattctagttaatcatgcagtggaagtttattatgtttaaataaattttaaaaagtttaagtgctcacttctgtttaatatattaaatattgatatatcaacataaataaaagcttctgttaacaaagttctttgtttaaaaagtataaaggaatagtgataaccaaaaagtttgacagctgccatattatataatatcaaaaaattatttattacttactactcatctcaccagcaaaatcattggatcctgcacagggatagatacaaattttgcaaaattttaattttcacttgatagttttaattttttcattggcaataaatactgtcatttatttttcttgaagtgataggcacactttgttcattttcaagaaaatgtcttccacataccctagcccaaataacatagtttgtgtgtcattctttcaagtaaaaattgtattatttaaaaacatgtctcacaagtgcttttcctgcaatggcccctgtacttcagtatatagcaacagtgcttatgtatacttcccatttcatcataacagataatgtggatattcctcttttatatgtgctacaccagaatttaacaaggtaactgcagggagaatctgaaactatattaataaatttttcatattctattatattaaaatccatttgtctatcttgcgttttaaatgagtgttttgcccatttataagtttgaaacatcatgtattagtcatttggaaaatactgatttagtgaggcctgcagatctttcaaatgtgtttctttataccaccattgtcatagtgtggtttgaggactgacagggctagcagaaaactccatctgtatcaggtatttgacggtcaagatttatgtaattaagaatttttggaaatagtaagattgttaaatttctaccctgactgatgagtattaaaaaaaagaaccacagattatcagtatgtggagtgaaagatggacatcacaacatatatggcagatattaaaagaataaaggaatattataaacactcaaaagctaagaaacaatgtagatgaaatggaacactcttttaaaaaatattcattgcccagatttacacaagaaaacagctacgtatttattaaggaaattaaatttgcagtaaaaaagttcctcacaggccctgtgatatcatgagggaataatttgatgtggctcctacttctaaaagcagcaattctcaaactttttaagagttttggaatgtctgtgttgttaaaaattattgaatatctcaaggtgctttatataggctatagctattgaaatttactctattagaaattaaaactaagaactctaaaaaatatttattcatcagttcattgacaaagtaataacccagttaaagttaacataaaattttatgaaaaataactttttcaaaagaaaaaataatataacctattgtgataaccctgtgggttgcttagcccctggaaaactgctgtacacatgtaagagaatgccagtgaaaaaggcaaaaggtaggcatttctggaatggaacttttatttctcagcactttataggttttttaaagagaaggtgttgctattgttgtatcagataacacagatattaaaccaacaacagtaacaaaagacaagggcattatataatgacaaaggatttaattcaacaagatttgtatctcctaggtatatatgccatacccagtgttgtagcacccacatttataaaacaaatactactagacttaggaaaacgagacaaccacacaataatagtggaggactgcaacagcccactgacagcactggacagatcaccgcagaaaactaacaaattctcgacttaaattgaagttttgaccaaatggacgtaatacacacgtacagaataccctacccaacaaccacagaatacacattttactcatctttgcatgctctaaaaatgaccacatgctcagtcataaagcaagtctcaataaattcaaaaaagcagaaatcataccaagcatctgtttggaccacagttgaataaaattagaaatcaataccaagaataactctgaaagccacgtaagtacatggaaatgaaacagtttgctcctgaatgacgtttggctaaacaaaattaaggcagaaatacaattttttttggaacaaatgaaaatagaaacaatatatgaaaacctctaggatatagcaaaatagagttaagaggaaaattttagtgctaaattcctacatcaaaagaaagatctcaaattaacaacctaacattgcccctaaaggaactagcaaaataagaacaaaccaacctgaaagctagcagaacaaaagaaataacaaagatttgtgcagaactaaacagaattgagaccaaaaaattacacacagaatcaacaaaacggaaagttctgtttgtccttctaaagggtaaacaaaattgatagactgccagctagatgaaccaagaaaagagagaagattcaaataagcacaaaaatggcaaagatgtcattacagtggataccatagaaatacaaagatccttagagactactgtggacatttttatgtgcacaaactagaaaatttagaggaaatagataaacatctggaagcacacagccttccaagagtgaaccaggaagaaatcaaaatcctgaacagaccaataacgagttataacgttgaatacataataaaatctaccaaccacaaaaagccctgaaccaaaaggattcatagccagattttactagatgttggtagaagagctgataccaatcttactgaaactattccaaaaaaatcaaggtggagagatatcctccctaactcattctttgaaaccagtatcatcccaatatcaaaatctagcaaggacacaacaacaaaaagaaaaacagaaatgcaggccagcatccctgatgaagatagaggcaaaaatcctcaacaaaatactagcagactgaatctagcagcacataaaaaagataattcaccatgatcaggtaggttttttcctagatacaaggatggttcagaatatacaaatcaataaatgtaattcaccacataaacagaattaaaaaacaaaaaccatattcttatgcagtaaaatccagcatctctccatgataaaacctcaacaacctaggcatcagaggaacatacctcaaaatagtaagagtcatttatgacatacccacagccaacatcatcctgaatgagcaaaagttgaaagcatttcccctaagaaccagaacaagacaaggatgtccactctcaccattccttttcaacatagtactagaagttctagccaaagcaatcagacaaaagaaataaaagatgtccaaataggcaaagaggaagtcaaattatatgcttgttgatgacatgatcctgtacctaaaaaaaccctgaaagattccccgaaagactcctggacctgagaaacaactccagtaaagtttgaggatacaaaataaatgtacaaaaatcactggcatttctatacaccaataacattcaagctgagagccaaattaagaactaatttacaatagacacacacaaacacacacaccacacacacacaatatctagaattacatttaaccaaggaagggaaagatctctacaaagaactgtaaaacactgatgaaagaattcatagatgacacaaacaaatggaagaaacgtcccatgcttgtagattgaaagaatcaacattgttaaatgaccatactgcccaaagcaatctacaacttcaatataattcctatcaaattaccaatgtgattttttttcacagaattagaaaagacaattctaatattcatgtggaaatacaatagagcctaaataggtagagcgatctaagcaaaaggaacaaagccagaggcatcatattacccaacttcagactatactgcaaggctattgtaaccaaaatagcacggaattggtacaaagatagacacatacatcaatggaacaaaatagagaacccagaaataaagccacacacctgctatgaactgatcttcaactgagtcaacaaaaataagcaatagagaaaggataccctattcaataaatggtgctgggaaaactggctagccatatgtagaagaatgaaaatagactcctacctctcactatatacaaaaattaactcaag

SEQ ID NO: 980 - DNA, 1155 bp, Homo sapiens
  source 1..1155: mol_type = genomic DNA
atgagcagaagcaagcgtgacaacaatttttatagtgtagagattggagattctacattcacagtcctgaaacgatatcagaatttaaaacctataggctcaggagctcaaggaatagtatgcgcagcttatgatgccattcttgaaagaaatgttgcaatcaagaagctaagccgaccatttcagaatcagactcatgccaagcgggcctacagagagctagttcttatgaaatgtgttaatcacaaaaatataattggccttttgaatgttttcacaccacagaaatccctagaagaatttcaagatgtttacatagtcatggagctcatggatgcaaatctttgccaagtgattcagatggagctagatcatgaaagaatgtcctaccttctctatcagatgctgtgtggaatcaagcaccttcattctgctggaattattcatcgggacttaaagcccagtaatatagtagtaaaatctgattgcactttgaagattcttgacttcggtctggccaggactgcaggaacgagttttatgatgacgccttatgtagtgactcgctactacagagcacccgaggtcatccttggcatgggctacaaggaaaacgttgacatttggtcagttgggtgcatcatgggagaaatgatcaaaggtggtgttttgttcccaggtacagatcatattgatcagtggaataaagttattgaacagcttggaacaccatgtcctgaattcatgaagaaactgcaaccaacagtaaggacttacgttgaaaacagacctaaatatgctggatatagctttgagaaactcttccctgatgtccttttcccagctgactcagaacacaacaaacttaaagccagtcaggcaagggatttgttatccaaaatgctggtaatagatgcatctaaaaggatctctgtagatgaagctctccaacacccgtacatcaatgtctggtatgatccttctgaagcagaagctccaccaccaaagatccctgacaagcagttagatgaaagggaacacacaatagaagagtggaaagaattgatatataaggaagttatggacttggaggagagaaccaagaatggagttatacgggggcagccctctcctttagcacaggtgcagcagtga

SEQ ID NO: 981 - DNA, 9028 bp, Homo sapiens
  source 1..9028: mol_type = genomic DNA
acagtttcccttccgctcacctccgcctgagcagtggagaaggcggcactctggtggggctgctccaggcatgcagatcccacaggcgccctggccagtcgtctgggcggtgctacaactgggctggcggccaggatggttcttaggtaggtggggtcggcggtcaggtgtcccagagccaggggtctggagggaccttccaccctcagtccctggcaggtcggggggtgctgaggcgggcctggccctggcagcccaggggtcccggagcgaggggtctggagggacctttcactctcagtccctggcaggtcggggggtgctgtggcaggcccagccttggcccccagctctgccccttaccctgagctgtgtggctttgggcagctcgaactcctgggttcctctctgggccccaactcctcccctggcccaagtcccctctttgctcctgggcaggcaggacctctgtcccctctcagccggtccttggggctgcgtgtttctgtagaatgacgggtcaggctggccagaaccccaaaccttggccgtggggagtctgcgtggcggctctgccttgcccaggcatccttggtcctcactcgagttttcctaaggatgggatgagccccatgtgggactaaccttggctttacgacgtcaaagtttagatgagctggtgatatttttctcattatatccaaagtgtacctgttcgagtgaggacagttcttctgtctccaggatccctcctgggtggggattgtgcccgcctgggtctctgcccagattccagggctctccccgagccctgttcagaccatccgtgggggaggccttggcctcactctcccggatcgaggagagagggagcctcttcctgggctgcccgtgaccctgggccctctgtgtacactgtgaccacagcccgctcctggaccctctgtgcccggctggccctctgtgcccagccagcctgcacctggggatgccaaggcctggggagggtggtttcacccaggccaagcctaagacagtccctctgggccctgctgggtaccggggtgtgacaccactgggaggacaagatgaggggcacccctggggccgccctgacaccccctcgaggctcctgccccgggggtcctggtgccccttcactgtggcaggcgactgggggttccccacctcggcccctctcccggggcctgctccccggcacctgaggcagcatccttgtcagggccgtgccttcctgcctcagcgccacctcttaaggttggcccgtgggtcactcaggactcagaactggagattctgggcaaaaggcaaagagcaaagggccaaaaggcatcccagggagacgactgcgggggaaccagagggcagaggggcgctcgtcacaggggagggggagctgagcgaggcaggaggggagccgagcctctccccccgtgtcccggctcttcaggcacgccctcgggacgccaccctccccgacccaggcgggaaagataagagcaaggtgtccgcagcctgacactcgtgcctcaggtgcccgcgcttgtgccggacaagactctcacaggtggcatgcctcggtttccccactggtaacagcacagggcactcagcaaggcgcagtgggcatgactggggtcctgtgggtcctgacccagatgtggccaccccggccgcagtggtcttcattccaggatgcctcttttccctcctgatctattcactgcgttcgccattcggtcattcccggggccaccactcccacctcaggtgtgtgcttcccttgtgttttatgagatatccccaacccggctgcttattggccccgtccgagggcaggagcataaataagagcctctgctttggcgtgggaccactgtgagctccagtcagcgctgccactgctgagctctgggccttcgacaggacttggccccttactgacttctccgtgtgctttgggtcatgggtgaggacgcctcctggcaaggctgcgtcctgaggattaaatcgggtcatctgtgaaaactacccagcccagcccctgacacttttttgtttgtttcttttagtgacagggtcttgctctgtcacccaggctggagtgcagtggtgtgatctcggctcactcgacctccggggctcaagcaattctcccacctctgcctccagagtagctgggactataggcacgtgccaccctgccaggctaatttcttccattttttttagagacagggtctcgctatgttccccaggctgggctcaaatggtcctcccacctcagcctccccaagtactgggattacaggcataagccactgcatctggcctccatgacacatatttttaaagtctgatttttaaagtcaaacttttgaagtcagattttaaacggactattttgaaaaatatacaaaaacgtttaaaaacaatgaatatccctcacctagaatcaataactaagaatattgacacatttgctttggggactgggcggctggagctgccatgacaaagctccgccgaccgagtggcttttaaacagagcctgccctctcgccgactgagggctggacgtgcaggatggagctccgcagggtcggctcccctgtgctctgaggggctctgctcagcctctcccggctgtggcttaaaaacagagcctgtcctcccgccgtggggggctggacatgcaggaccgaggggccacagggtcggctccctgtgctccgagagggctctgctcagcttctcctggctggggggttttgtggccaccctctgtgttcctgggttcagaagcatcccccaggctctgccttcatctctgcacgggtgactctgtacaggaagccaggcctgctggtcaatggccacccagccctgtgccctcatcttacctagtcccagctgccgtcaccctattcctaataaggccgccttctgaggtcatggggttaggacttccacataggaatctgtggggacacggttcggcccacagcccttcccacctccacacacacacacgactgtgaggagttggaagacctcactcctcacccctgccaggtcctctagggacaagctcgctgtcctcatcccagcacagcccgtgggacggtttccttgtccctaatgggaccacggtcagagatgccgggtctggtctgggccagcaggttcctccgcccggggcaggcagccttcttctgtgcgcttctggaaagcaatgtcctgtaatgcggtctctctgcgggagcacccccaccgccacctcacaggcctgttccacagccccgggatgggctctgtctccctcctgaccctgcatagggcacagccctctctcatcaacccacgatcctacgtggatccgagagggagcacctggggaaacaatggaatcccatagaaacaccccaaatctaacttgatccaggaccagccagtggtcacttctgaatattcaccttcctagtagacactaccagccaagggaggccaggaagccttcctggaggaggtggcctgaggactggggtgaggcaggccctgcgtgggggtcgccacccagcacccccacactgggtgggagccagtctctgagactggctgggggaggtgggagagggggctgcttgaactgcagacaccgaggtctagcccccaccccacccagccagttggtggaggcaggggaggccgaggggcccagctggacctgctccccggggtggattccaaaataggggggttggggggggcggaacaggagcccagggtcctggcttgaggcccagtggctgagggctggtgcaagccagacaggaaaagggttgagcctgtcagcgccagcacagatcaagtcaggagcaggtccctccaccaatgtgtgcaaataaatagcagctaagtttccagttacaagaacaatgcacagatggtcccagggacattgcggtgtggacacacagcggccattgtcctgtcgccagcacctcgccctacagctggggggtcccttagcacttcctagccatgcagggtccctgctcacagtacccgtgatgacttctgttcctcacctgcctgtctgtcccgacagctgcatggcagccctggcctgggagatggagaccccgaggggctgcctgcggtggtggggcccctgggtccccactgcattcccagaaacccagagggcagggcatttcccctgctctgtgccgagtccacccagccccagcctaggcccagtaagggctgcagcccaccctgtcccaggctgcctcccaggagccctcttggccctgatgccagaagcccatcttcctccattcaggcaggtctctgagtgccctggcctggctgcctgctggccctgagagtcacactaccccacagccctccttggtcaaaatccactctggagtggctggaagattccccgggcccacgccgcacacgcctatgcagggagcttcccctggccggccggcagacaagggcggtctcagagagggggctcacctcagcagccccttgtgtagctggccctcgcccctgccacctctgggaacaccaccaggaagctgggggacaggcacgcaggtgaaggaggcgagcgcttgtcagccgggaggccatgggcacagagggaacagggacaccctgggtggcctcaaggtcacttcaaacccctcactcgtcccctgggagggtgcccagtgaggttggcactaggagttggtcctggtcacatgacagacccacccacctctggtgtccagccagcacgccgtgggccagcctggctgcagggacacgagggcagcagccccctcctcctctgagctggttgctccttgagtcatcaccaccgcctgccacggaggccgcctgtcccaggaagcagagggaccgcagctgtggcaaccagggcctggtctctgtgtcacctcgctggggggccgtgcccaggcctgagacggaactgagtgacagtgcactgggtctgacagtgtggggctggcgccatgtttggggaaccctgtggcatgggacctgtgggtgagccgggaaaatcaccccgttgcatggcatctcgggcctggatcttaagcgcctgtgttggtgcctccgcctggcggaagagccgcgacccccacgttgccatgcgggtatcccaagccctgaccctggcaggcatatgtttcaggaggtccttgtcttgggagcccagggtcgggggccccgtgtctgtccacatccgagtcaatggcccatctcgtctctgaagcatctttgctgtgagctctagtccccactgtcttgctggaaaatgtggaggccccactgcccactgcccagggcagcaatgcccataccacgtggtcccagctccgagcttgtcctgaaaagggggcaaagactggaccctgagcctgccaaggggccacactcctcccagggctggggtctccatgggcagccccccacccacccagaccagttacactcccctgtgccagagcagtgcagacaggaccaggccaggatgcccaagggtcaggggctggggatgggtagcccccaaacagccctttctgggggaactggcctcaacggggaagggggtgaaggctcttagtaggaaatcagggagacccaagtcagagccaggtgctgtgcagaagctgcagcctcacgtagaaggaagaggctctgcagtggaggccagtgcccatccccgggtggcagaggccccagcagagacttctcaatgacattccagctggggtggcccttccagagcccttgctgcccgagggatgtgagcaggtggccggggaggctttgtggggccacccagccccttcctcacctctctccatctctcagactccccagacaggccctggaacccccccaccttctccccagccctgctcgtggtgaccgaaggggacaacgccaccttcacctgcagcttctccaacacatcggagagcttcgtgctaaactggtaccgcatgagccccagcaaccagacggacaagctggccgccttccccgaggaccgcagccagcccggccaggactgccgcttccgtgtcacacaactgcccaacgggcgtgacttccacatgagcgtggtcagggcccggcgcaatgacagcggcacctacctctgtggggccatctccctggcccccaaggcgcagatcaaagagagcctgcgggcagagctcagggtgacaggtgcggcctcggaggccccggggcaggggtgagctgagccggtcctggggtgggtgtcccctcctgcacaggatcaggagctccagggtcgtagggcagggaccccccagctccagtccagggctctgtcctgcacctggggaatggtgaccggcatctctgtcctctagctctggaagcaccccagcccctctagtctgccctcacccctgaccctgaccctccaccctgaccccgtcctaacccctgacctttgtgcccttccagagagaagggcagaagtgcccacagcccaccccagcccctcacccaggccagccggccagttccaaaccctggtggttggtgtcgtgggcggcctgctgggcagcctggtgctgctagtctgggtcctggccgtcatctgctcccgggccgcacgaggtaacgtcatcccagcccctcggcctgccctgccctaaccctgctggcggccctcactcccgcctccccttcctccacccttccctcaccccaccccacctccccccatctccccgccaggctaagtccctgatgaaggcccctggactaagaccccccacctaggagcacggctcagggtcggcctggtgaccccaagtgtgtttctctgcagggacaataggagccaggcgcaccggccagcccctggtgagtctcactcttttcctgcatgatccactgtgccttccttcctgggtgggcagaggtggaaggacaggctgggaccacacggcctgcaggactcacattctattatagccaggaccccacctccccagcccccaggcagcaacctcaatccctaaagccatgatctggggccccagcccacctgcggtctccgggggtgcccggcccatgtgtgtgcctgcctgcggtctccaggggtgcctggcccacgcgtgtgcccgcctgcggtctctgggggtgcccggcccacatatgtgcctgcctgcggtctccaggtgtgcccggcccatgcgtgtgcccacctgcgagggcgtggggtgggcttggtcatttcttatcttacattggagacaggagagcttgaaaagtcacattttggaatcctaaatctgcaagaatgccagggacatttcagagggggacattgagccagagaggaggggtggtgtccccagatcacacagagggcagtggtgggacagctcagggtaagcagctcatagtggggggcccaggttcggtgccggtactgcagccaggctgtggagccgcgggcctccttcctgcggtgggccgtggggctgactccctctccctttctcctcaaagaaggaggacccctcagccgtgcctgtgttctctgtggactatggggagctggatttccagtggcgagagaagaccccggagccccccgtgccctgtgtccctgagcagacggagtatgccaccattgtctttcctagcggaatgggcacctcatcccccgcccgcaggggctcagctgacggccctcggagtgcccagccactgaggcctgaggatggacactgctcttggcccctctgaccggcttccttggccaccagtgttctgcagaccctccaccatgagcccgggtcagcgcatttcctcaggagaagcaggcagggtgcaggccattgcaggccgtccaggggctgagctgcctgggggcgaccggggctccagcctgcacctgcaccaggcacagccccaccacaggactcatgtctcaatgcccacagtgagcccaggcagcaggtgtcaccgtcccctacagggagggccagatgcagtcactgcttcaggtcctgccagcacagagctgcctgcgtccagctccctgaatctctgctgctgctgctgctgctgctgctgctgcctgcggcccggggctgaaggcgccgtggccctgcctgacgccccggagcctcctgcctgaacttgggggctggttggagatggccttggagcagccaaggtgcccctggcagtggcatcccgaaacgccctggacgcagggcccaagactgggcacaggagtgggaggtacatggggctggggactccccaggagttatctgctccctgcaggcctagagaagtttcagggaaggtcagaagagctcctggctgtggtgggcagggcaggaaacccctccacctttacacatgcccaggcagcacctcaggccctttgtggggcagggaagctgaggcagtaagcgggcaggcagagctggaggcctttcaggcccagccagcactctggcctcctgccgccgcattccaccccagcccctcacaccactcgggagagggacatcctacggtcccaaggtcaggagggcagggctggggttgactcaggcccctcccagctgtggccacctgggtgttgggagggcagaagtgcaggcacctagggccccccatgtgcccaccctgggagctctccttggaacccattcctgaaattatttaaaggggttggccgggctcccaccagggcctgggtgggaaggtacaggcgttcccccggggcctagtacccccgccgtggcctatccactcctcacatccacacactgcacccccactcctggggcagggccaccagcatccaggcggccagcaggcacctgagtggctgggacaagggatcccccttccctgtggttctattatattataattataattaaatatgagagcatgctaagga

SEQ ID NO: 982 - protein, 288 aa, Homo sapiens
MQIPQAPWPVVWAVLQLGWRPGWFLDSPDRPWNPPTFSPALLVVTEGDNATFTCSFSNTSESFVLNWYRMSPSNQTDKLAAFPEDRSQPGQDCRFRVTQLPNGRDFHMSVVRARRNDSGTYLCGAISLAPKAQIKESLRAELRVTERRAEVPTAHPSPSPRPAGQFQTLVVGVVGGLLGSLVLLVWVLAVICSRAARGTIGARRTGQPLKEDPSAVPVFSVDYGELDFQWREKTPEPPVPCVPEQTEYATIVFPSGMGTSSPARRGSADGPRSAQPLRPEDGHCSWPL

SEQ ID NO: 983 - DNA, 867 bp, Homo sapiens
  source 1..867: mol_type = genomic DNA
atgcagatcccacaggcgccctggccagtcgtctgggcggtgctacaactgggctggcggccaggatggttcttagactccccagacaggccctggaacccccccaccttctccccagccctgctcgtggtgaccgaaggggacaacgccaccttcacctgcagcttctccaacacatcggagagcttcgtgctaaactggtaccgcatgagccccagcaaccagacggacaagctggccgccttccccgaggaccgcagccagcccggccaggactgccgcttccgtgtcacacaactgcccaacgggcgtgacttccacatgagcgtggtcagggcccggcgcaatgacagcggcacctacctctgtggggccatctccctggcccccaaggcgcagatcaaagagagcctgcgggcagagctcagggtgacagagagaagggcagaagtgcccacagcccaccccagcccctcacccaggccagccggccagttccaaaccctggtggttggtgtcgtgggcggcctgctgggcagcctggtgctgctagtctgggtcctggccgtcatctgctcccgggccgcacgagggacaataggagccaggcgcaccggccagcccctgaaggaggacccctcagccgtgcctgtgttctctgtggactatggggagctggatttccagtggcgagagaagaccccggagccccccgtgccctgtgtccctgagcagacggagtatgccaccattgtctttcctagcggaatgggcacctcatcccccgcccgcaggggctcagctgacggccctcggagtgcccagccactgaggcctgaggatggacactgctcttggcccctctga

SEQ ID NO: 984 - protein, 706 aa, Homo sapiens
MSPFLRIGLSNFDCGSCQSCQGEAVNPYCAVLVKEYVESENGQMYIQKKPTMYPPWDSTFDAHINKGRVMQIIVKGKNVDLISETTVELYSLAERCRKNNGKTEIWLELKPQGRMLMNARYFLEMSDTKDMNEFETEGFFALHQRRGAIKQAKVHHVKCHEFTATFFPQPTFCSVCHEFVWGLNKQGYQCRQCNAAIHKKCIDKVIAKCTGSAINSRETMFHKERFKIDMPHRFKVYNYKSPTFCEHCGTLLWGLARQGLKCDACGMNVHHRCQTKVANLCGINQKLMAEALAMIESTQQARCLRDTEQIFREGPVEIGLPCSIKNEARPPCLPTPGKREPQGISWESPLDEVDKMCHLPEPELNKERPSLQIKLKIEDFILHKMLGKGSFGKVFLAEFKKTNQFFAIKALKKDVVLMDDDVECTMVEKRVLSLAWEHPFLTHMFCTFQTKENLFFVMEYLNGGDLMYHIQSCHKFDLSRATFYAAEIILGLQFLHSKGIVYRDLKLDNILLDKDGHIKIADFGMCKENMLGDAKTNTFCGTPDYIAPEILLGQKYNHSVDWWSFGVLLYEMLIGQSPFHGQDEEELFHSIRMDNPFYPRWLEKEAKDLLVKLFVREPEKRLGVRGDIRQHPLFREINWEELERKEIDPPFRPKVKSPFDCSNFDKEFLNEKPRLSFADRALINSMDQNMFRNFSFMNPGMERLIS

SEQ ID NO: 985 - DNA, 32767 bp, Homo sapiens
  source 1..32767: mol_type = genomic DNA
atgtggcctctcgccccttttcctgactctgagaatgtggccggagccggggcgctcctgctccgcctcgccgccctcccggggctgtcctgggccctccggccgccgcctcccgctccagttcgcagctgggcgacaagtggctggtaaggaggccaggggcgggagcctgggcgcgggaccgggggcgcacggcgggggaccgagcgcgcgtccctggctagaggtgccgggtcccgggaggccgggctggcggggaggctggcgagcgccccctggcgggcaccgccttctaggcgcacccgcagtgcgccgggcccgccagccccgccagccccgccagccccgccagccccgccagtccccgcgcagtccccgcgcagtccccgcgcagtcccagcgccaccgggcagcagcggcgccgtgctcgctccaggtagggccccgcgccccgcgccgccgccgggagggagcgggctggaggggccgagacccgtggcgagaagggctacccgggcccctcggagagcctccgggaaggggtgagggctgccgggtgagcaggcggagtaggaaatggaaccaagcgggcgcaagagcgcaccgggaagaatttccccgctgggtttctgggacgcaggtcgcacgggatgcgggatgctggcgaccttagccgggtgggggccgccggcctgggggcgcttcctcctttcttctcccttttccttctcacctgaacgaaagggggcctgcggggagggaagaaggtggaaagtttttgtattcttggtaaaaaaaaaaaaaaaaaatgcgtgaggaaacatgttttctggagatggtatcctgtccacaggggagcataaccccttttctgggaatgtattggagcacggacgggggtgccattgctcaggcttctaaacaagccaagtttctggtcaagggcctgggggagggggaggcaggtctttgaaagataccaaaaaaaaaaaaaaaagaaaaatctgcgtgctcattcctgtagcctcaagtgaggttattccccagctttgagggccaggttaaccaagcaaagtttgtgcaataaagtatctttgtggtattggattttcgagagccaccgttatcaatgggagagtgactgttgaatgctacaggcgtgtgcactcccccgtgggcatgaagagaggtccacgggctggctggattgggagactccggtcatttctgcaaggagagcgccacaggactgccttgttccctgggctgtcctgcccctgtgcgggctggacgtggtgctataaaagatgattcaggagtggcacaggctgagggggactaggctggagaaggtggagggaagagggagcactccgtgccctcttcctgtccatgggaaatgaaccatctgtgcctggtgtccaagtccttgacgttccagttgccctttgagagcacacctcaagcctgctgaattcttttaagaaccacctacaagatctgagaagtccgcccatgctttctgtcaactccggcctctttgaccttttcttttgccaaagaaaattctaaaccactgggattcgtgaggctccgtgagagaggcaagaagcctggagggtccactccgttgctcttttcccttggtttgctccctagaagccatggtccccactgggcccttcttgcccgaggctgtgtgatagacaagccctattcctaaggtcctgggtcccccaccccaccccacaccccgaccttgtgaatcatcatcttcatattttccctaacttatctttggtaacccttgtaaaatggcaggcttactgcggatgcttaatctcttttaaaagtgctgtgtctagcgggaagaagagtgacatttactaatatggttgcaaattacttttgaagtttatgcacagctgtttaaaatccctctgagatcagtgccattgtttgatgcaggtgcttaccgcagaaggctcttgttagtcccttcctcctgctgattgaacatacatatatttaaagacgtggcgtagggagagcttctaaaacctgcaaagccaaagctgcacagctcctgcaagttagcgatccactctaagtttttcagttgttgtttctgtcttcttgcctctcatgaacttctgtttctgatttcaagagtaacctgctgggcaccatcagcctttgtttcagtgacctgcgattttcttctacactttaaaaatgtcaatatccaggcaagactcttgtcacccaccatccgcgttgtcatgttcatttccgctactgtcttgtgctgtggtgcctcgggatggcaactgttacttgaggagctaacttctacctctgttctcctacagacatgtcctcattgcgtcttcgctcaccatacacggtgcagctcctggaaatttgatttgttttgctgtctcacttctccttcaggcaacaaggggatggtgttcgattattcacacctcagctccttctgtaatctcaaagatccctttcaacaataatactctctgtctcttgttaacgccaggcatcagaagcccccttacatagccggcttgtcactggtcatttctataaagtattctcattctaacacatgctgtctcttccgtggaaaagactaaattcttctctgcaatgaattagatgttttaaccaaaattccatgtggactgggtccagaattttctttcaagagtatgggcttgtggtacaagtatgtaacttcggggattcagaagtagacctacacagacaaatctccttataacgtgttatttaattatggtatatttgcctttctggaaattaggaattagagttagtacttcctgtttttaatgcatttgattgatgtcttagagttgctgattatgttgttgcccctaaaaatgttgctaatgtgctggtttgttaacaaggttatatttgatttcaggtgatttcctttttatggagttcagtctttaatttttttcaataatttgcctcaaatcatttaaaatgatatattgttatataatgaaaatcccagcaatatagacgtgattccgtgtgtgtgtgtatgtgtgtgtgtaatctgtaatttaaaatagagaaattagtattgtgacggcatacatagcattaaactcatgcttgctgtttctgttgttttaacactttaagcagctcatttctaagcagctatgtgttcagctcagctttttcatacctattccaattgttaaggaagaagtcatgagaaactatagaaaaatgtgatgttgaaccagagagatggattaaaagctgtttccttacaatggtgaaaatatctttcattattttaacatgccaagcatttatacatgtcaaattctgattgctctgtcatctaaacacattcttggggacaaaatgagcatcagagttttaaaattaggaaagctcactcaagcccagaatcatagatttttgctcctggattaaattagcaagtatttggcaggacatctttctgcaggttgctgtaggttgatgttagcttttgaattaagctaatagtattaattataataataataatcagcatcaacaaaaccaatgaaatatggttttgagtctttattatttagaatttatgtgctgtatatcatactcagaattttatttatatgtaagaggcattactgcttcatttaacctccaaaagcctttataaattagatattattattattccagtttttcagatgaggaaactgaggctcaaggggtagagccccttgtccaggtcttataaccagtcagtggtagagtcaggttagttggaccatccagattagtctaaccatcaagcatttgctttaaaccgcagtcccaggtgacctaccagttaacttttttattgtggttaaaatacacataacttaaaatttaacttcttaactattttctagcgtacagttcagtgacattaagtatattcacattgttttgcaaccattgccatcatccatccacaggattcttctcatctcctaaaactgaaactctgtcctcgtggaacattcgttcctcatccgtctttcctctcagcccctggcagccacccttctacttcctgtctctaagattctgactgctctagggacctcacagaagcagaatacagtatccatccttttgtaactgtcttatttcacttagcatagtgttctcaagctgtatccatgtgacagcattggacaggacttccttcctttttaagtctgaatactattccatttatggatataccacattttgcttatccttgtatctgttgatggttgcttctatcttttgattattgtgaataatgctgccgtgaagaggaacacgcagatatctgtttgaggtcctgctttcaattctttggggtatgtacccagcagtagaattgtggggtcgtagggtaattctatgtttaattttttgaggaactgccatattgttttccacagtggctggaccgttttacattcccaccagtggtagaaagggtcccaattattccacattctcagcaacgctgtcttttgttttgtgttttttgagatggagtctcgctgtgtcgccaggctggagtgcagtggcatgatctcagctcactgcaacctctacctcccaggttcaagcaattctcctgcctcagcctcctgagtagctgggactataggcacgcgctgccacacccagctaacttttgtatttttagtagagatggggtttcaccatgttggccaagatggtctcgatctcttgacctcatgatccacccaccttggcctcccaaagtgctgagattacaggcgtgagccaccgcacctgggcttttttaaaaatcttctttatagtagcctttctaattggtgtaaggtgctgatagttaactttttacccaatcattgaatgcccaatggcagggatctctgggctgatgctactcctgagttcattgtttatttcctatcccagcttgagcatatacacctttttctagtgtagaattaatggaggaaatacaactcacacagcacctgagggactagggaagccatggaaaggacagtccctaaaacataaacagaatgtcccggtaggtagggttatctccacctccatgaggaaccttatgattcagaaatgagtagttgttgagaataaagtgaacatggcatcagtgttaataaccctgaatgtgtgggacagatgctttttagaagattagttacagatataattatcttttgtatgttatcagagcaggacaagttcccaggacaatggagagaatggaaagggaaactgctattgaattcaccaggcctttgttgcaagcctcagatcacacaccgtgctgcaaaacccacagggagatgtggtcaggcaaataggaaattataatgaattgtgatgaattcatgagatatttgtactattttgtatcagtttataatgtcatgcaactctgttttatatttgctagtttcctttctgtctcttttttcctctagcatgaaactccatgagggctggcattttgtccctacatgtgtccccagccactctaacagggcctgacacataccaagttgtgaacaaatatgtgcagaatgattgtgtgtttcagtaggggacacacttggtattatgtgcacagctagatttggggtgtcgcagagctgtcagtgacggctcaactgagacctgaaggggaagtggcagtgagccagatgggggttctgggaggtaggaacagtgtttgtagaatgtccctgcagcatgtgagtctggaatcccagtgcagtccagtctaagccttgcagatgagtggaaatgagcagagtaagcatcacagcttccatttaaacctctgctccccatcctaatttgccatatgaccttaaccagtgaacttcttggagtgtcattctctccatttgcaaagtgaagaaaattgtgatctctgatagcagtgatgctgcgagaaaggagcatgtgccagtgtgtgggctattgctgggtggagctggaggagtcagctgtgccagatcacataggacctgtaagcaggtgaaccatatacgttatcctccagatggggactgtttatagagtgaaagagcacgttattaatcactaagcttgggtaacaggtacaaacccagattgtcctgggcagactgtcccgtagagttgtcctgcgttaagtcatacgaaggagtttgatccttttctaagaacaggaggaaccctttaaatgctttatctaccaatgtatacaagtgccattcaggttctctccagcgtttcagagagttttacctgcccatgaactcacagcactcggcttgcactgcaaactcacctatacgttggcagctgtctcctcactgggcacttaattcatgaacaactaggagggaaagacaacaagacagccaggggtctgctctttggctctttgcatttttttttacggggtcttgctctgtcgcccaggctggagtgcagtggcacgatctcagctcacagcagcctccgcctctgaggctcaagggatcctccggcctcagcctcctgagtagctgggactacagttgcatgccaccatggcctggctagtttgtgcactttgtagagatggtgttttgtcatgttgcccaggctagtctctaactcctgggctcaagtgatctgcccgccttggcctcccagagtgctgagattaaagacatgagccaccacacctggcctagctcttttcgcctttaactggagtgttagctgatatcaagaacacatcttttgggtttttctttttttaaccttgtaacacctaaaggactgcggctaagtgttaaaagaaaaaaatttctatctggtggtttaaatatctgcagaagcagaatccttgtcatcctgaaattttttccctgtgggcaagaattcctaataagcgtacaatctattggaaaaatcaaaaagtaaacaaactatggcaatatattctaacatgtattgacttgtcactatcggccgtttgctgtgctaagcactatatgtagatgattgcttgggtgctttgagaacatgtagaagggaaccaagtcctgattcggaggttcaggaaaggctttcagaggacaaggtatcgcgggtggggatggaagatgtatgggaattagccaaaaggacaggggttcagaggtgagccaagtctgtcctgaaagtaagcagaaatgttgttgttcttgtcgttttgagagaagttcatctcagctgtgttcagcatttttagggcataagcttcaacattttccgttctgttttcactgatatgttttagctatacaaaagcaggccttctacacagtttttcaaactccaagacacagtctactagtgggcaatgacattaattttgggggtgataacaagcatgaaatagaataaaacagaaaatattaagatgcatttcatgtaggaagggtaattatttcatgaaactgtatcatttggtttgggacacattaaatctgttcgtacctaaaagaagacattcatgcagccaacaaacatggaaaaaaaaccctcaatatcactgatcattagagaaatgcaaatcaaaaccacaatcagttaccatctcctgcaagtcagaatggtgattattaaaaaatcaagaaacaacaggtgctggcaaagttgcagagaaataggaacgcttttacactcttggtggtgggaatgtaaattagtccaaccattgtggaagatggtgtggcaattcctcaaagatctagaaccagaaataccgtttgactcagcactcctgttactgggcatatatccaaaggaatataaaccattctgttataaagatacatgcacacgtatgttcattacagcactattcacaatagcaaagacatggcatcaacccaaatgcccaccaatggtagtctggattaagaaaatgtacatacacaccatagaatactatgtagccataaaaaggaatgagatccctgtcctttgcagggacatggatagagctggaagccatcatcctcagcaaactaacacaggagcagaaaactggacaccttatgttctcacttataagtgggagctgaataatgagaacatgtggacacagggaggggaacaacacacactggggcctgtcgggaggtgggattggagggagggagagcattaggaaaagtagctaatgcatgtggggcttaatacctaggtgatgggatgataggtgcagcaaaccaccatggcacgtttacccatgtaacaaacctgcacgtcctgcacctgtatcccagaacttaaaataaaaataaaaattaaagaaaattacatacctatggcatttagttttctataccattcctttaagtcatagaatcagatgagctcaggggctagaaggaagagggagcgatgggaaggcagtcgttggtcatgccctgggcctggatcgcgggaatcagtcattcagaaagccccatatgttgggtgggtctcacagcttacagagaagccagctgaggtgtgcaggttaagaaacttgatctagggtcacagattaaattactagcgctgacccctgatctcttggcttctgatgtggtggtattctttccatacctccagggactgtgttcccaaagtttgttagttaggtggctgtttagggaaggaccacacctggttcctgtttgtttgtttcttggtttgtttgttggtttgtttgtttgtttgtttttgaggcagggtcttgttctgttgctcaggttggagtgctgtgactcaatctcggctcactgcaacatctgcctcccaggctcaagcaattattgtgtcagcctcgagagtagctaggactacaggcatgcaccaccacacctggttaatttttatgtttttagtagagacagggtttcaccatgttggccaggctagacttgaaatcctggcctcaagtgatcctcctgccttggcctcccaaagtgctgggattacaggtgtgagccaccccacctatcaagggaagatattttcttaaggggagtatgtaataacaaccatgtccctggtttgttaggaaggttataaactttgaaatatacccatcagtttcataaagagcaagacaggttaggaagaaatagtgttcattatacagactagagagctttcagcttgacattgacaaatataaacttggccactgtccctccactaaagcgtttcccttgctgctggggaaggaccgcctggtgatgttgtgtgagatgatgcactttctttgccccctctgtggtcactgggatcacagctaaatccaactgtctgctttttccagtgtctacacataggctgatgagttctcccggaaaacacgccgctctgcaaattcaggatgccgtagctctgtgacttcccactccatctaggatctctgtcttccccagctcccagacgtttccctggccaatgatcttccttcccacggcagcttctccacagctgctcctgcctccgccgtcccctcgcactcagcagctgtcttgcctcctgcttccctgagaaagtacaagtttcccgattcagaactgcccccacctggggatcacagggctgcacgcctcactttatctgaatccatcctctcatccttcttttctttcacaacgaaagaaacccctcagttccagccaggcacagtggctcacatctgtaatccaagcactttgggaggccaaggtgggtgaatcacttgaggccaggagttttagaccatcctggccaacacggtgaaaccccgtctctactaaaaatacaaaaattagccaggcgtgctggcgcatacctgtaatcccagctactcgggaggctgaggcaggagaatcgcttgaacccaggagacagaggttgcagtgagccgagattgccccattgcactccagcctgggtgacagagcaagagtctgtcttagaaaaaaaaaaaaaaaaagaagccccttagttcctgtctgaggctcacctcccctggggccctggaatccatttctttcttgttcttgggaatctcaatctcttatcttccctgtcacctgcattttccttctctccctcatttctggccccattctctctgtattaagtgcgcttaaatcccttccttctgtgaaaaaaagaatatatatccttttataccttcctccagctacttccttgtcttgcttctcttcacaatcaaactcctcaaattgttgtctacacttgctgcctttgcttcctcaccccacatgtcttgaacgacagatgcctggccttgcctcttgcacccctcagaaatgatcacccgcactctcctcatggccgattcccgtggagttctacccgcctcttacctgacttcctgcaaccagatgtgccgtgagcacacatgcatcctgggacattgtccctctgtgtctcccatgacccccctgcccatgtttccttccttccttcctctcttctcctttgcaagctcctcttcttttatcaacctggatgactgatgttcctcaattttcccgccctgtgagcatcctcttccctcatcagcctccatacctatctcctcgctgactgtgacccagtcatgactgccccagatccttgccattcttccccagaaagttcctgggcacgtctaatgcctcatgccccaaactggatgcaccaccttcccctttctctttcaacacgttttctcctcctgctcttttctgcaactggcatagacatcacctgctgcacgacctgaaatctgtgtgtctttccttgattctgtctcccctatctccatagcttgccccaaaccaattttattcactcaccccaattcctctgtgttccctccagcctgtcacactcccaccacctctgctctaattacaggcagcaccgtttctcttctgggttggtgtggaacctcctccctagccgtggttaccatgggctgccttctggaacccagtgtgccactccctgctcttaagttctccaaaggctacccagtgcccccgggataaagcccagcctccctgatgtggattcgaaggttctactcctttcctctccagccctcacatcgggttcctccaagtctgagcctctttaagctcctaggaggtcccagcatcccctcatctcgtggacgtctgctcaatctctgagctacttcctgtacatcttcagctcccaagatgtctcttgtcctctggaaagctcttcctgatcctccacatcaggacttggctttcttccacattgtacactccctgaggactggatccacactctctcttactctttttgttgcacttctagcagtcagcattgtgtctgacacgtagtaggtgctcagtaaatattagtgggataaataaatgagtcatatattttagaatctgtaatgcccaaggtactgtgtgctaagtgttagaggaaaagaatcccaatctagtgacttaaatgtctgcacaacagaattactattgtcttggaagattttgcctgtggacctctggagttatctagataaattctaccagaaatcagagctgaagggggtgggaaatgtttagaattccgggaggtgacttgctgcaaagactccatctccccttgtctatggtgtgatttttccccttatcatccccttggcatcctgctttgtggaccactgtaatgtcaataattaaaaaaaagattaaactggccgggcgcggtggctcacgcctgttatctcagcactttgggaggccgaggtgggcggatcacgaggtcaggagattgagaccatcctggctaatgcagtgaaaccccgtctctactaaaaatacaaaaaaattagccaggaatggtggtgtgtgcctgtagtcccaactactcgggaggctgaggcaggagaactgcgtgaacctgggaggtggagcttgcagtgaaccaagatcacgccactgcagtccagcctgggagacagagcaaggctccatctcaaaaaaaaaaaaaaaggttaagctaagagtgatcaggaaataaaagataatattaaaatattcaaaaatattctataagcaaaagaatgaggcaacaggtaaacataaaatgtagacatagcaaaaattcataagtgattttaataaagaaaaaatagtaaaggataaaagataaaattttgtttaaattaaatgaaaagatattttaagtcttcttcaaaacaaaatcataattttttttgttagttttggggggatttttgtttttgtttttgttttgttttgtttttttcttttttggagacaagagtctcgctctgtcacccaggctggaatgcagtggcgtggtcacagctcactgcaacctccgcccttcgcctcacctgagtagctgagactacaggctcacagcaccatgcctggataacttttgtatttttagcagagacatgttttcatcatgttggccaggctggtctccaactcctgacctcaaatgatctcccaaccccctgcgccaccaccaaagtgctgggattacaggcgagagccaccacgcccagcctataatcacttttaaatgtactaaaatagatacgagtaagaaaggtaaaagactaaattcaagaattaggatgatagaggtatgcccaaaacaaaataaatgaaagcattcacaaaaaaaagaatgtttatcttaaaaggaaagagtagtaaactatttaagggactcacttaaaagtagaataaaccaacattatgaaaccaaagaaaaacataatctttcaaagaagattagaaataaatcccagcagcaataaaataaaatgggcactcacatgtatgggtttctaacaacagctaaaccccagctaaaacaatgttaaagccagtgctgaggtttccagcttgtaccccagaaggccttggtgacctcagggatgtcatagagggaaaacactgggacatttccctcctgaggaatgtaagcacagggtcagataagggtagagaagagagctacactcatctttgtctgcagaattcgggtgacgcgtcttactgtgcaagacttggcaccttgtgcattctggccccaaattgcatctccatccgtgtgttctgctatcctttcagaaatgggaagatatggtgggccctttagggccaagcatatccctgtctttgttcatggaggcctcttctcaaacagaatccctatgtcctgttcatgaaacactatttgcccctactatataattggcatttttttaagtgtcctattgtgttagagcttttccaagtcgcctctgatgtgtggactgactttctgcttcctgtgtctctgggagcttgaggcttctatccttctcattagtggagctccctaatgacattttaatgcaattattgtctcttgagtaagcctgagagcatgtaccgagtcttctctttctctttctctctttaactctcagcacagagctcagacggaaccttggattgaggaggttcatgaggcctcctgtagccagggaatatattttatttccctccagttaccaatatgaaggtttccaaacgttcatatcatattttaggccctaatcattaatattgagagccctaagcactccgatttgggtccatatctaaaggtgagttttaggggatctgactgagaagtgttccgggccagctccctagaaacccttgggtgcactgacttcttcctggccagtgtcgtctgcttggtcatcagtgtgttcctcccctcctgagttctctccatctttctgttcttctgttttcttgcagtaatcgaggacaggtggtcgctggcacacaaggatattaggaacccatgaggttgtcccttgtaggagaaaagactggagagaggccactgaatctcgttgtgtcattcaccctacctagtcctgctctgccagggtcatgctcaccttccagacccacccaacagtgaagtcggactgaaaaatcccagaagtgggaattgggagacaaggttgagtgcattagggggatgtctaggattccccctgattcgaatattttgtagctgttttgaggggtccttttcgcatccagaccaggatttcacctggacagctggagtgggaaagaagtggatacatttcaagctcctagggctgtagttaatgtgtcctgtcataaccactgcagaacagccagtgtaggtcagagaatgcaaccactggtggcatgtataacccttcaccaataaaccgaagtgcagtcccacaaacatgggagtcattcagctacaattagctttgctatggacaggaggaattaaaatttaataccgtagcaacagcaaaacatgattcgttctacagtgttagtggggatggtaacacaaggaaggttatgataaccaagtttctctgaaaaggtcaagtggatttcctcagtgggctatgtttctggaatataaggtaatggtgaataatagaggaaatctccctctaagaatgggaactctttaattcatctgcattagtcattcaataaaaataaattagcatacattttactggggacctatttagaggggtactatgaacagtagccataaataactcttgcataggaagaacgtgaattactctactttgtaaatattagtttgcaaaagtaattgtggttttgcaattacttttgaggaacgtaattcagtgggaagtaacttgcataattccaagttctgaagcagaggcagctgaaatatttgccattgcaatgaaaaggactttcctcccgggattcttccctagttcctggacaaggagatttgttaatatttgtagtacacttgagatctgcgactaaaagtgctttaggagagaaaagcatcacaagaagaaagggctttttgtttctttttaaaataaaataaatgcaatttctttcaccaaaaaaaaggcgaacattgctaagcataaatgagcacttccttttagaaatgaataaagtaaaactcaaccattagcaacttcccatagctagagctcgcagaggaaaatgttaacacatagcatcatgtttgaattttattattttcatagagaagaaaaccagcaagcaaaccccttctcttgagagaacagccttgaagtactcagaacagagagcatatgtatctattgaaataaaataaagtcacttttctccaggaaaatactatagatattttctcatggaaaaaatagactagacctatgggtctaaatatgtaaacataaagagagatcacactatttattcaagtactgtgctatctcaagacacccagccatgctgctaagaaggcgcattataaagaagcatcaaacattctgcagtttcaaaaagtgaaacgtatatttgcttgaatgttcatctaaacactacccataggaaaattcaaacgaaactccagggaattttaatccacatgccacattttcttagtcttttgcaagatagagtcagaggattacattttctgaaaaccgctttttaaaaagcttaagccctaatcagttaagtgtgacaaaggcttgaaatgggatttggtagcaagtaattaaggatgaagtacaagtgggtatatattgacagtggacccatgctattgtcctgaaattgtcagcggggagtttattctttatttgacattgtttatttgacccagagcattgctttgaagatatcaattgctatggaacaaactgctcccaaacttagtggcttaaaaaaacagcaccattgtatttgttcttgattctgtgggctagggatttgggtcagccttggcttggcggttttggtcttcagagcatccctagggccctctcataaggttgcagtcagacctgagatgaggtcactcccttatatggcccctgggtggatgcagctaggaggttgagattcccccaccccgtcttcctccatatgtggccccaaagtaggaagttcctgctgctttggtctttgggtgaaaaacaggtcacgggccaggcaagatcaaggaggggcagcagagggcacttctgggcgagcagtacagtggcatcgcagaaggacaggtgggagggaaagggataggctgcagcagctgcctttgaaaacgccatcgagcaatagtattgcagccatttataccataatatttcctacagaggacctcgtttagtttccgagattgagcctctagtctcgctcttcacaccgctgaagatgtgcggtagaggatcttgctgaaacgaaaatgattgctgcactcccctgcaaagctctttggttactccatatcacctgcaaaatagaatcccgaatctttgcggggcccgtgagttcttcccagcctgtgccctgcctgccagactcaggtttcccttgggtccttgagcacctcgtagctccccagaagcctcttgcattttacagctctgcacctgatcccaggcctgagtgcacttcctcacgctcacatcgttactttgctaacccctgagacctcacctcctctgcaaaggcccccacgggctgtgtcaaggtgtccctcctctgcgtgccctggcatgctgtgcacatggacagctcagcagcactaacacacccttcctccctccccaactgcactgtgagctcccaagggcaggctctgcatctctttgtctgtctagcccctagccctcggcttgagcagagagtcccacacatagcaagtgctcagtaaattttggtggaatgtcagctcagtataggtaaatgacagagtggaggagtgtcggagggaaaagaccagaaaaccctgtacaggaagaaggcggtgtgatcccatggagagttggagcctggggaggcaggaagaggaggaacaaagcggtgggcttagactgcaattggaggctgagagcactctaggtagtcaagagacgcgaacaagcatagaaagtaaagcagaaaatctgattcgatgtaagagaaatcgaggcatgtgtcatggtgaggggcttatagggaagaggcagtgacaaggtaggagagatggcccaacatcaggacgggccatggagacctgtccccatggggagagccctgacctggactcagaaggcagggcacccagaatcccacccacgcacctccagacatgcagtagagctcagtcatagtaggcatgcagtagacctccctgtcaccgagaagaggaggagaggcactgggcaaagtgaggttgctgcttccgggactcttggaactgtgagacttacgctctgaaatcctagctgtcacttacttcactttcgactgaatatcttcactcttgagccaaagtgattgcatgcctttaaagtgaaactgtgcgctgggatctagttgacaagggacaggggctattgttttgttgggggaggggaggtggcagctgagagccaaccaaggaagcccaccttgaaagaatccatagccttttttcaacaaaaaaactaaaaagtaatcactacagaaaatattttagtgctaaatcttggaagaaaacatgatgagtgttcttttgactctgagtatataataattatagctaacatagactgagctttttctgtctactagtaactgttctaatcactttgcatccattaacccatttaatcctattatgatcctcatttttcagataagaaaagtgaggttaaatagcttgtttaaagccacagagctaccatacagcagaactggaatttgaactcaagcagtttgatgccatgatctgtgttcttaatactccatgtagcaaagcctgattttgggactataccttatctactgacttatgtttaaaaatactacctgacattggagttaattctgagaagtgggttttgagacttccttctccctttatatctcaattactgtttggggctatttccttgttttgctgtccaatgtattacttatgttagtaatggagagaacactcactctggttgagcataatcatcaagccgggagctctgctaagatccagtcggcttggctgggttcttctccaggcattctctgctgggccctgaagcgtgcgtctctctgctgaagcatgtgaacattcctcctggtgtttagagagatttggaaaaggctgaaaaaccgcatggaactccggaagttgttgtcttttcagggaaaacttgtgagggagacaggagatggccacagtggttttctttggggtccagcactgaccggggcatttatgaggctgccctgcaggagaaccacacagatgagttcatagacaagcctgagtgggcttctccttcgttcttccttacccacgagcgtccacctcaatccctctctctttcctttccggtatctccagatgccaggtccgtggctcaatgtatttccttcctaccagcattattttgaactgacaatgttgtaaattttaaactatattttaagtaaaccttaaaagcttattttagaatcctaatctgctttttcagacttttattcacctcagatctccaactccctttactttttgcttgaactctcctcccttcttcctgctttcctcaactctttcatgctgtgtttaataacatgctaaacacattaaaaacagcaagttctatcatatcaacatacatgcccacacccacacacatacgtactgacgactgtcacttgcaaagagctgttaagaagaaagtttgtttaattaaaaaccagcgagaatggtggccagattaacattcttgagtcataacttggaggtttgaacttcaactttatggagccgttctgagaatttaaaaaagtaatctattctgtcatactgtgagatctacataaattattttttggcataggcctttgtaactttttaattgacttttgagtcagtgtgtttctgtgtatgtaaatcaattgtaggttcacgtcaaatttctgattgtctcagatatgtattgtttagtaatatttgacagggtcctgaagcacaagattccaaaaagttcaaaaagatacccttattcaaggaaacatttctttttttcttgtttctttttttttttttttttttttttttttgagacagggtctcactctggtggtccaggctggagtacagcacaatctcagctcaatgtaggctgcacctcccaggctcaggtgatcctcccacctcagcctcctgagtagctaggattacaggtgcacaccaccacacccagctaactttttgtatttttagtagagacacagtttcgctgtgttgcccaggctagcctcaaacccttggactcaagcaatctgcctgtcttggcctcccagagtgctgggattacaggtatgagcacccagcctcaaggaagaattttttagtcagcaatttgaaaagaataaatttttttttttttttgaaatggagtctccctctgtcgcccaggctggagtgcagtggtgcaatctcggctcactgcaaactccacctcccaggcttatgccgttctcctgcctcagcctcctgagtagctgggtctacaggtgcccaccaccacgcctggctaattttttgtatttttagtgaagatggggtttcactgtgttagccaggatggtcttgatgtcctgacctcgtgatccacccgcctcggcctcccaaagcgctgggattacagacatgagacaccgcgcctggcctcaaaagaataatttttaaaatttcaagaaacctatactttgttttggcttggtttctaaaatagaaaataaaatggattatttatatttgaccaaatagacacattttcagaggctgaacaattcactgagtatgtaagcattaggcctgaaaatgaatacggagaaaaattagaatagccacgaagtgcagcatatccgtgaaacactatctcaggggcggagacaaagtcgccacactttctacgggttcattttgtcctgatggttccatgatgcgctgcctcccagccagtgtttgcagaaggtttttagattcagtcatggaggggaagaagaagctgtgaaaaccaaaaacagcacagaggggtttctttctccttccagtaggcttcccagcaaatcaaggatgactgcctgtagcacgccgctcctcacctagtctcaaaatactccagaaagttctccctacaccttattctatccagcacctgaaatgctgtcagctaggatcttaggggacacagatcctcttaaaaatgcaagcactgctgagattcccttcacccattagggtggcttaggcagtaacaaagagaaaatggatattttcaaggagaaggggaaagctgggttttattcagtcactaaatgttgactgatcaaacacctaacatgtcagggctttttctgggcgtttaaaatacaggggagaagagaaggagaaaggtactgaccctcgtcaagcctatgcctacttttttttggagtagaaagacaatagctaagtaaataacacacaaataaggtaaagtcaggcacctcaaatacagtgacttgaccactacacattctgtgtacgtaacgaaataccacatgtgccccataaatatgcaaaatatgatgtatcaataaaaacaaacacacacacacaaaactcaaagaacaataaaacaaagacggtgaagaggtaaagagaatttctagaacctggcctgtttttagattattaaatgtttccttttttgatggagagtgaagaaaaatatctgatattgtacttgctgccacaaaatcatggttaacagaaaaagatacaggccaggcacggtggctcacacctgtaatctcagcactttgggaggccgaggcaggcagatcacctgaggtcaggagttcgagaccatcctggccaacttggcgaaatcccatctctactaaaaatataaaaattagctgggtgtggtggtggatgcctgtagtcccagctactcaggaggctgaggcaggagaatctcttgaacccaggaggtggaaattgcagtgagccgaaactgccactgcactccagcctgggtggcagagcgagactatctcaaaagaaaaaaaattacaaaggagtcactagatgatctagaaaaaggcatgtccctccttccctggcccaaacaatgcacagctcttatctgccccagtcctcaagggctgggaccagggctcttttattacccagaagttcctttgccagttcttttcctggcacctagttggtgactaatgaatatttcttcctagtgagcgtagtataaggtatctgactgtggtcatttatgttcctaatgaggatacgtaacttttctttttaaaccttaactttttattgcctattgctgaaatgttagcagataggccaatgagtagaaagaaccccaagaattgcctgattaattcccactcatgcagcccaggcccaagctctcaccttctgccctgcttttaacggcagcacatgtcaccgctgacgggacctgcctctctgcgcgtgaccatgcacttgggactctctaaatgtctcaccggagaatcaatagccctagttcagctctgaatgaagtttctcgtcgcccccttctcttacaccctaaggataaagactgtctctgagaattttccccaaatcttcctaacatagagataaaaatagtaaaataagaaattagacccctcaacttcaactttaaaatcttatttctcttcctgcatcacggtgaccacctcctcacaagtgcaagaatagatgacgatattccagcatgctgtgattctcctaaaaacctgctgctcctagggactctgtggagtgagtttcctggaccgaagtcacttctcagatcttcatgttacacccatgatgtttgcttgctaaaccatcagcttaagttatttatcctgtatcttttatctcagttttctggttgcattttatctgtgtcatctttactttagtcaagctaacgctgtggttttgcaaattaaatcagctgtgggtttcagtatgtaactcctctttgtgtttactaagccttttttaaaaaaaacaaaatagtactgtatgtctgtttacatctttagtagtgtgtaagggaagattgttttctttagagttcttttgaacaatttcaaggctattcagaaggatccattttaagaaaccaaaacatctttttaaaatgccttgtttaatatatatctttagccataatggaatccccttaaaattttgaagttgatctgtaataaagaggttgtgtgggtcatgagtctggactttatagttcagacaaagagaatctgcttcatgtttcaaagcaaggaagagatttttttaaaagacagctcacatggcccgtgtaggggtggaaaaggcagcgtgaaagagcaaggggataagtaattaaacatctattggaatcatgaaattattaagagaaaatgtctgaagttccagagctaaaagactgaagagcagtgatgaaatgcaacaaaaataaccagaaaaatccatgggacttgttgcgtagatggttggaggagatgaagatgaaggagaactcagctggttccaatatttctagcttggaagactcagtaagtggtaattccattgatcaagacaggacagagaggagaggtacagacactggaaaaagtagaattcatgtttgtttcagttgtgtttgaggggctggtggaacatcacctggaaaggtccaatatggagttgaatacaggggaccgaagaaagtgaatgtatagttcaagaaagatattctttttgaggctactactaggtagagggtcataggagccatcaaaatagatgagattgaccagaaatgttggtttaaaaaaaagggggaggaaagtcaaaatgtattccaaaatagttaggtaaagaagtgaaaccaacagaataagctgaagagtgagctgagagggaaggagagcaggagagaagaagggagtcgacagtgtcctgtgcagtgtcaaggaggaagaccaagaaattgaattaaaatacaattgatagtacagagttacatttggtatagagaaaggtctctggaacaaaaggaagaaggtctctggttgaggaggaagaccatttccagccgcagggtctggaaatgaccaagtcatcagcgctcttgcagggagcaagatagatccacagagtgctggctggaggaatccatatggcagagggcagagaagcgaatggaaggggaggaagcaaagatggttcaggaagctggttggtgaaggaagggaggtaaggccatagcagcgggagaagccacggcagaagttgttagaggttgcaaaaccggagggtgtttataagcgggagtgggagacaggcagaaatcacaagaatggcaaggggttaaagaaaagaacaattccaagagtgtgtacagggttaggatcatgtatgcatgaggcattcagggaagaactagatggagactgggataagttgaaccagagcgaaggaagttgagccatttatgtcttgcggcttccagtttttccttaaaattaacaagctcatctgccgaggtggagaaggcagagtcatggttttggagacataaggggaacaagtgtgggacagcccgtttaggaaattggaaaataaacaggccaggaataagatcaaaaataaagccaagattgttggcaaattcagcaataaatcaaatgcttacataattcattgttttttattgtagtgaaaataaacataaaatttacaattttaaccactttaagtgtaaagtgcagtggcattaattagattcatgactgtttccagaacgttttcatgacccaagcagaagctctgtacccagtaagcagtaactctccatttccctctcctttcagtcccaggccacccccttctactctttgtctctatgaatttgcctcttccaggtagctcatattaagtgttgctttttttttttttttttttttcccaagacagggtcttgctttgttgctcaggctggagtgcagtggtgcaattacagctcactgtagcctctaactcctgggctcaaacattcctcccaccttaccctcttgagtagctaggactacaagcgtatgccactgcacccagctggtttcttaaattttttgtagagatgtgagttttgctatgttgcccaggctggtctctaacccctggcctcaagtgatcctcctatctcagcctcccaaagtgctgggattacaggcatgagccctcatgctaacctatttgttgcttttaaagcattaatcatgggataagaaaaaggaataagttattcttctgctgtataacactctgtaaatgaagaggtcattcctaaaccatatcctggttttgttgttgttgttgtttgttggttttttgaggcagagtctcgctctgttacccaggcttcagtgcagtggcacgatctcagctcactgcaacctctgcctcccggtttcaagcgattctcctgcatcagcttccccagtagttgagattacaggcatccaccaccaccccagctaatttttgtttttttagtagagacgtggttttgccatgttagttaggctagacttgaactcctgatctcaagtgatctgcccacctttgcctcccaaagttctgggattacagatgtgagctaccgtgcccacctggcccataccctgtttttttttaaatccaccatgtggtatccatttataaaaccttattattaatacaatgctatgaaattgatataatgctttacccttaaagtgattcaaatcagctgaagctttgaacctctctaaatcctactttgaattaaatattttctttatcatacgcatacacaacaatgaatgtcttttttcccccatccaaatgatagcacagaattgtgaatctgtttctgtttagtgttctcttccagaggattgcattattcactgaatgtctgttgtctgaaatagaagttcccacagtagtttgtgtacgcatcatttaggaagataagtggtttttcctgttatgtatacaaataaccagtctgtgttaatgtctattatgggtgacatgaacagatccttctcgaggaggtttacatgtgtcactatagcattagatcttttttttttttaacttttattttagatacagggagtatattacatgatactgaggtttagggtgcgattgatcccatcacccaggaactgagcatagtacccaatagttagtttttcaaccctagaccccccccctcccacctttacttgtccccagtatctatcgttgccatctttatgtccatgagtacccaatatttagctcccacttctaagtgagaatatgcattatttgattatctgttcctgcattcaccacttaggatcatagcctctagctgcaatcatgttgctgcaaaggacatgattccattcttttttgtggctgtatagtgttccatggtgtctatgtactacattttccttatgagcatctaggttgactccatgtctttgctgttgttaatggtgttgccacgaacatagatatgcgtgtgtctttttggtagggtgatttattttcttttggatatatacccagtgatggaattgcaggttcaaatggtagttctgttttagattctttgtagacttagtaatttttaatggaaatgaattatcttcccaatgaaagtaaattctaataaaagacttattgaaagaaatgtctgatattgggatcattttcctaacacaatttccattttcattttctgtaaagcccccacaagagttgacagagttcctgaggtggcgatgagtgagccgtgcctctttctacagtggatgtagtggatgtggcttacagatgccttttacatttccagctgtagacagaaaatgccagaggccacagcatttccccaggccctgaaactaagctaacaccctctaaatattgccaaatcaaagtaatagaaaggaaaactgttctcatattgtctcacttccccaaacatatctcccctaattcagttccaaccacactttaattcccagtttggacccccatttttctcctgaaactactgctggagagttctctctcttcggagttgcagttccttctgcaacgttgcatggactttggtaccaactggccttggttgctttgtatatgagtcctgtatcccaaggagactataatcttcctgacggtcgtgggtttcaattcctagaatcacgaaatagcagcactttacagatgagaacattagacccagagaggtaaagtaacttgcctaaggtcacacagctgaattcagcaaacaggtgaattagtctttcttccctacttgaactactacttgaatgagtgctccgagacttgatgtctgcgacactctgtttttttttactgtttccactgcacttttttgttctagagacctttctccataccaaatataattctgtactatcaattatattttaatgtataaaattatagtcacatttcaggtcctgcctcccagggataaccttgactaaagttttaggtgctcagaaataatttagtgacacatttatagattttaaagtttggtaagaaatttggaagtaactgccaaagttgaagatatgtgcataccgcaactttgtaggtctattgctttgcatgtattctatcgaaactctcaaatatgttcccaaggaggtatctacaaggatgttcacagcagcatgagttataagaaagtggaggagaaggaggaggaaggaagaagaaggaaaaaaaggaaaagatgaaacatcaatagaagaaaagatggatagcatatttctttcttcttcttcttcttttgtttgtttgttttttttttttttttttttttttttttgagacagggtcttgctctgtcacccaggctggagtgcagtggcactatctcggctctctgcaacctccacctccagggctcaggtgatcctcccacctcagcctcctgagtacctggggccacaggaacacactaccatgcccagctaatttttgtatttttagtagaggcaggattttgctatgttgcccaggctggtctcaaagtcctgagctcaagcgatctgcctgcctcgtatgtctattccgatggaatctgcagcagtggttctcaaagtgtggtccaggagatcattaaaaccttttcagggagtttgcaaagtcaaaactgatttcacagtattactgaggtctatttttccttttcactctcattctgtaccttgaagttttccagagactgcatgttctgatagccacaggctaaacgcagaaactgtcttctattaaaccagacattaaagagatcacaaaagtgtcaaacagtgccactttttttcaatgttttttgctttgaaaaacataattatttatcataaaatatgttgtcttcacgtattacatgataggttttcattatttttaattaaaaaaaaattttaatttttctccttcttattttctgatgtggtaaatattgacagatataatccctataaaccaaagctctttgtttttctcacaatttttaagagaataaaataattcttagagtaaaaagtttggttgggtgcagcgactcacacctgtgatcccagcactttgggaggccaaggcaggaggatcacttgaggtcaggagtttgagactggcctgagcaacctagtgagaccctgtgtctacaaaaaataaaaaagaaactagctgggtgtggtggtgcatgcctgcagtgtaactagttgggacactgaaggggaggatcacttgaacccaagaggtggaggccgcagtgagctgtgattacaccactgcactccagcctgggcaacagagcaagactctgtctagaaagacaaaaaaaaaaaaaaaagactaacaggtttgagccctgctgttgcagacagtgagaatgaatgaatggagactgcacgcactgagcctgaatcttggaggcacgatcactggagttgcaggagaatataaacagtgatttatattgtgttttataactagtaaaacatgctgtatgcagaatacatgtttttaggaatatacaggtatataaaacatgtataaaaagttatttttatatttgtgtatatctgaaacactttataatacacttgaaaaactataaatagctatataagctcaacaaccacaaaaaaaattagaaaatgaacaaaagacttgagtagacatttcctcaaagaagatatacagatagccaacaagcatatgaaaaaaagttcactatcagtgatcattagagaaatgcaaatcaaaaccacaatgagatacagtctcacaccagtccgaatggctattactgaaaagccaaagaataacagatgctggcaaggttgtggagaaaatggaatgcttatacactgttggtaggagtgtaaaccagttcaaccattgtggaaagcagtatggtgattcctcaaagagctaaaaacagagctaccattcgacccaggaatcccattactgggtacataaccgaaggaatagaaatcgttctatcataaagacacacgcacgtgtgtgttcactgcagcactatttgcaatagcaaagacatggaatcaacctaaatgtccatcagtggtagatagataaagaaaatgtgggctgggcgtggtggctcacacctgtaatcccagcactttgggaggccgaggcaggcggatcacaaggtcaggagatcgagaccatcctggttaacatggtgaaaccccgtctctactaaaaatacaaaatattagccgggtgtggtggcaggcacctgtagtcccagctactcaggaggctgaggcaggagaatggcatgaacccaggaggcggagcttgcagtgagctgagatggtgcactccaggcactccagcctgggtgacagagtgagactccatctcaaaaaaaaaaaaagaaaaaaaaaagaaaatgtggtacatatgcaccatggaatactatgcagacacaaaaatgcatgagaccaggacttttgcagaaacgtggatggagctggaggccattatccttagcaaactaacacagaaacagaaaaccaaatgtggcatgttctcacttataagtgggagctaaattatgagaacacatggactcaaagaggggaacaacacacactggggcctgtcagagggtggagggtgacagtagagagaagatcagaaaaaaataactattaggtaccaggcttagtacctgggtgatgaaataatctgtacaacaaacccccgtggcacaagtttacctgtataacaaacctgcaggcgtacccctgaacctaaaataaacatttaaaaaaaagagaagatgctcaacattacttaccattagcaaatacaaattataatcccattagagaagtgcaaatcaaaggagatattgccttgaacccattaggatggctagatcaaaaaacaaaaaataacaagtgttggtgaagacgtggagagttggagcctttttgcacttttgctgggaatgtaaaatggtatagctgctatgggaatcagtacggtggttcctcaaaaacttagaatgactgcatgatccagcaattctaccctgagtatatattcaaaggaattgaaagcagggtcttgaagagatatttacacacccacatcgattagcagcaggattctcaatagccaagaggtggagacgacccacatatccatcaacagatgaatggatgaacaaaatatgctacaaacatgcaatggaggctgggcacagtggttcatgcccataatcccagcactttgggaggctgaggcaggctgatcacttgaggccaggagtttgagaccagcctggccaacatggcaaaatcccatctttactaaacatataaaaattagccgggcatggtggcatgtgcctgtaatcccagctactcaggtggcggaggcatgagaatagtttgaatctgggaggtggaggctgcagtgagccaaggtcataccgctgcactccaggctgggcggcagagtgagactccatctcagaaaaaaaagtgcaatgggatattagactattagccttaaaaaggaaataaattccttcacatgctgtcatgtggatgaactttgaggaaattatgttaggtgaaataagccagatacaaaagaacagatattgcccgttctacctatgagaagtatctcaagtagtcaaattcacagaaacgggaagtagaacggagattgcagggcttgtggaaagggagaatggggagttattgtttaatgggtgcagaatttcagacttgcaagatgtaaaagttctggagatgaatgcccaacaatgtgaatatacagaacactgctgaactatacattgaaaatgattaagatggtgaatttcagccgggcgcggtggctcacgcctgtaatcccagcactttgggaggccgaggtggccagattaccagaggtcaggagtttgagaccagcctggccaacatggggagagcgctgtctctactaaaaatacaaaaattagccgggcatggtggcaaacacctgtaatctcagctactcgggaggctgaggcgggagaatttcttgagcctgggaggtggagattgcagtgagccaagatcatgccattgcactccagcctagcctggcagacagagtgagactctgtctcaaaaaaaaaaaaaaaaaaagatgaattttatgttatgtgctttttaccatgataagaaaagctacataattgcagtttttgtcattacttttaatggcaaaaattgcaattacttttgtaccaacctagtaatcgctatgacaaacctttgtatgatgggggaattttctgattccctgccctcactccagttatcataaaaataagtcgactgtttctgaatttcccaagtgagtatcttgcccagacttcttgctttagtccagtctttgatgttggctcatatgaagcattctgcccttccagaatatcccgtacttcctccctatctacataaattctacccaagggaactctaatgaatcccattgcagcatgcccaactccatactgctttctccatgatacagtcagaagccaacccagggcacttggattcctcttgccttaaggacccaggacacttattttgtgtacaactagatgttcattacttatatggccccatgtactgcttcttaagttttcagagctgttccatcgctcccattagaatgtaagcccttggaaaacagaggtcctaataacacaacatggcttatacgtgcctgcctcagagctttggcatatggctgtcacacaataagactggtgaatgaatggataaatggatcatggatggatcaatgtggtctttcactgtagctgagctggatgcattaagaattaagtataacatcttctttttttattttattattattatactttaagttttagggtacatgtgcaccatgtgcagtttgttacatatgtatacgtgtgccatgttggtgtgctgcacccattaactggtcatttagcattagttatatctcctaaagctatccctcccccctccccccaccccacaacagtccccagagtgtgatgttccccttcctatgtccatgtgttctcattgttcaattcccacctatgagtgagaacatgcagtgtttggttttttgttcttgccatagtttactgagaatgatgatttccaatttcatccatgtccctacaaaggacatgaactcatcattttttatggctgcatagtattccatggtgtatatgtgccacattttcttaatccagtctatcattgttggacatttgggttggttccaagtctttgctattgtgaatagtgccacaataaacatatgtgtgcatgtgtctttatagcagcatgatttatagtcctttgggtatatacccagtaatgggatggctgggtcaaatggtatttctagttctagatccctgagaaatcgccacactgacttccacaatggttgaactagttgacagtcccaccaacagtgtaaaagtgttcctatttctccacatcctctccagcacctgttgtttcctgaccttttaatgattgccattctaactggtgtgagatggtatctcattgtggttttgatttgcatttctctgatggccagtgatgatgagcattttttcatgtgtcttttggctgcataaatgtcttcttttgagaagtgtctgctcatatccttcacccactttttgatggggttgtttgtttttttcttgtaaatttgtttgagttcattgtagattctggatattagccctttgtcagatgagtaggttgcgaaaattttctcccattttgtaggttgcctgttcactctgatggtagtttcttttgctgtgcagaagctctttagttgaattagatcccat

SEQ ID NO: 986 - DNA, 2121 bp, Homo sapiens
  source 1..2121: mol_type = genomic DNA
atgtcgccatttcttcggattggcttgtccaactttgactgcgggtcctgccagtcttgtcagggcgaggctgttaacccttactgtgctgtgctcgtcaaagagtatgtcgaatcagagaacgggcagatgtatatccagaaaaagcctaccatgtacccaccctgggacagcacttttgatgcccatatcaacaagggaagagtcatgcagatcattgtgaaaggcaaaaacgtggacctcatctctgaaaccaccgtggagctctactcgctggctgagaggtgcaggaagaacaacgggaagacagaaatatggttagagctgaaacctcaaggccgaatgctaatgaatgcaagatactttctggaaatgagtgacacaaaggacatgaatgaatttgagacggaaggcttctttgctttgcatcagcgccggggtgccatcaagcaggcaaaggtccaccacgtcaagtgccacgagttcactgccaccttcttcccacagcccacattttgctctgtctgccacgagtttgtctggggcctgaacaaacagggctaccagtgccgacaatgcaatgcagcaattcacaagaagtgtattgataaagttatagcaaagtgcacaggatcagctatcaatagccgagaaaccatgttccacaaggagagattcaaaattgacatgccacacagatttaaagtctacaattacaagagcccgaccttctgtgaacactgtgggaccctgctgtggggactggcacggcaaggactcaagtgtgatgcatgtggcatgaatgtgcatcatagatgccagacaaaggtggccaacctttgtggcataaaccagaagctaatggctgaagcgctggccatgattgagagcactcaacaggctcgctgcttaagagatactgaacagatcttcagagaaggtccggttgaaattggtctcccatgctccatcaaaaatgaagcaaggccgccatgtttaccgacaccgggaaaaagagagcctcagggcatttcctgggagtctccgttggatgaggtggataaaatgtgccatcttccagaacctgaactgaacaaagaaagaccatctctgcagattaaactaaaaattgaggattttatcttgcacaaaatgttggggaaaggaagttttggcaaggtcttcctggcagaattcaagaaaaccaatcaatttttcgcaataaaggccttaaagaaagatgtggtcttgatggacgatgatgttgagtgcacgatggtagagaagagagttctttccttggcctgggagcatccgtttctgacgcacatgttttgtacattccagaccaaggaaaacctcttttttgtgatggagtacctcaacggaggggacttaatgtaccacatccaaagctgccacaagttcgacctttccagagcgacgttttatgctgctgaaatcattcttggtctgcagttccttcattccaaaggaatagtctacagggacctgaagctagataacatcctgttagacaaagatggacatatcaagatcgcggattttggaatgtgcaaggagaacatgttaggagatgccaagacgaataccttctgtgggacacctgactacatcgccccagagatcttgctgggtcagaaatacaaccactctgtggactggtggtccttcggggttctcctttatgaaatgctgattggtcagtcgcctttccacgggcaggatgaggaggagctcttccactccatccgcatggacaatcccttttacccacggtggctggagaaggaagcaaaggaccttctggtgaagctcttcgtgcgagaacctgagaagaggctgggcgtgaggggagacatccgccagcaccctttgtttcgggagatcaactgggaggaacttgaacggaaggagattgacccaccgttccggccgaaagtgaaatcaccatttgactgcagcaatttcgacaaagaattcttaaacgagaagccccggctgtcatttgccgacagagcactgatcaacagcatggaccagaatatgttcaggaacttttccttcatgaaccccgggatggagcggctgatatcctga

SEQ ID NO: 987 - protein, 1837 aa, Homo sapiens
MSSETGPVAVDPTLRRRIEPHEFEVFFDPRELRKETCLLYEINWGGRHSIWRHTSQNTNKHVEVNFIEKFTTERYFCPNTRCSITWFLSWSPCGECSRAITEFLSRYPHVTLFIYIARLYHHADPRNRQGLRDLISSGVTIQIMTEQESGYCWRNFVNYSPSNEAHWPRYPHLWVRLYVLELYCIILGLPPCLNILRRKQPQLTFFTIALQSCHYQRLPPHILWATGLKSGGSSGGSSGSETPGTSESATPESSGGSSGGSDKKYSIGLAIGTNSVGWAVITDEYKVPSKKFKVLGNTDRHSIKKNLIGALLFDSGETAEATRLKRTARRRYTRRKNRICYLQEIFSNEMAKVDDSFFHRLEESFLVEEDKKHERHPIFGNIVDEVAYHEKYPTIYHLRKKLVDSTDKADLRLIYLALAHMIKFRGHFLIEGDLNPDNSDVDKLFIQLVQTYNQLFEENPINASGVDAKAILSARLSKSRRLENLIAQLPGEKKNGLFGNLIALSLGLTPNFKSNFDLAEDAKLQLSKDTYDDDLDNLLAQIGDQYADLFLAAKNLSDAILLSDILRVNTEITKAPLSASMIKRYDEHHQDLTLLKALVRQQLPEKYKEIFFDQSKNGYAGYIDGGASQEEFYKFIKPILEKMDGTEELLVKLNREDLLRKQRTFDNGSIPHQIHLGELHAILRRQEDFYPFLKDNREKIEKILTFRIPYYVGPLARGNSRFAWMTRKSEETITPWNFEEVVDKGASAQSFIERMTNFDKNLPNEKVLPKHSLLYEYFTVYNELTKVKYVTEGMRKPAFLSGEQKKAIVDLLFKTNRKVTVKQLKEDYFKKIECFDSVEISGVEDRFNASLGTYHDLLKIIKDKDFLDNEENEDILEDIVLTLTLFEDREMIEERLKTYAHLFDDKVMKQLKRRRYTGWGRLSRKLINGIRDKQSGKTILDFLKSDGFANRNFMQLIHDDSLTFKEDIQKAQVSGQGDSLHEHIANLAGSPAIKKGILQTVKVVDELVKVMGRHKPENIVIEMARENQTTQKGQKNSRERMKRIEEGIKELGSQILKEHPVENTQLQNEKLYLYYLQNGRDMYVDQELDINRLSDYDVDHIVPQSFLKDDSIDNKVLTRSDKNRGKSDNVPSEEVVKKMKNYWRQLLNAKLITQRKFDNLTKAERGGLSELDKAGFIKRQLVETRQITKHVAQILDSRMNTKYDENDKLIREVKVITLKSKLVSDFRKDFQFYKVREINNYHHAHDAYLNAVVGTALIKKYPKLESEFVYGDYKVYDVRKMIAKSEQEIGKATAKYFFYSNIMNFFKTEITLANGEIRKRPLIETNGETGEIVWDKGRDFATVRKVLSMPQVNIVKKTEVQTGGFSKESILPKRNSDKLIARKKDWDPKKYGGFDSPTVAYSVLVVAKVEKGKSKKLKSVKELLGITIMERSSFEKNPIDFLEAKGYKEVKKDLIIKLPKYSLFELENGRKRMLASAGELQKGNELALPSKYVNFLYLASHYEKLKGSPEDNEQKQLFVEQHKHYLDEIIEQISEFSKRVILADANLDKVLSAYNKHRDKPIREQAENIIHLFTLTNLGAPAAFKYFDTTIDRKRYTSTKEVLDATLIHQSITGLYETRIDLSQLGGDSGGSGGSGGSTNLSDIIEKETGKQLVIQESILMLPEEVEEVIGNKPESDILVHTAYDESTDENVMLLTSDAPEYKPWALVIQDSNGENKIKMLSGGSGGSGGSTNLSDIIEKETGKQLVIQESILMLPEEVEEVIGNKPESDILVHTAYDESTDENVMLLTSDAPEYKPWALVIQDSNGENKIKMLSGGSKRTADGSEFESPKKKRKVE

SEQ ID NO: 988 - protein, 975 aa, Homo sapiens
MSGIGNKRAAGEPGTSMPPEKKAAVEDSGTTVETIKLGGVSSTEELDIRTLQTKNRKLAEMLDQRQAIEDELREHIEKLERRQATDDASLLIVNRYWSQFDENIRIILKRYDLEQGLGDLLTERKALVVPEPEPDSDSNQERKDDRERGEGQEPAFSFLATLASSSSEEMESQLQERVESSRRAVSQIVTVYDKLQEKVELLSRKLNSGDNLIVEEAVQELNSFLAQENMRLQELTDLLQEKHRTMSQEFSKLQSKVETAESRVSVLESMIDDLQWDIDKIRKREQRLNRHLAEVLERVNSKGYKVYGAGSSLYGGTITINARKFEEMNAELEENKELAQNRLCELEKLRQDFEEVTTQNEKLKVELRSAVEQVVKETPEYRCMQSQFSVLYNESLQLKAHLDEARTLLHGTRGTHQHQVELIERDEVSLHKKLRTEVIQLEDTLAQVRKEYEMLRIEFEQTLAANEQAGPINREMRHLISSLQNHNHQLKGEVLRYKRKLREAQSDLNKTRLRSGSALLQSQSSTEDPKDEPAELKPDSEDLSSQSSASKASQEDANEIKSKRDEEERERERREKEREREREREKEKEREREKQKLKESEKERDSAKDKEKGKHDDGRKKEAEIIKQLKIELKKAQESQKEMKLLLDMYRSAPKEQRDKVQLMAAEKKSKAELEDLRQRLKDLEDKEKKENKKMADEDALRKIRAVEEQIEYLQKKLAMAKQEEEALLSEMDVTGQAFEDMQEQNIRLMQQLREKDDANFKLMSERIKSNQIHKLLKEEKEELADQVLTLKTQVDAQLQVVRKLEEKEHLLQSNIGTGEKELGLRTQALEMNKRKAMEAAQLADDLKAQLELAQKKLHDFQDEIVENSVTKEKDMFNFKRAQEDISRLRRKLETTKKPDNVPKCDEILMEEIKDYKARLTCPCCNMRKKDAVLTKCFHVFCFECVKTRYDTRQRKCPKCNAAFGANDFHRIYIG

SEQ ID NO: 989 - DNA, 32767 bp, Homo sapiens
  source 1..32767: mol_type = genomic DNA
attttgtcatgggggtttgttgtacagattatttgatcatccagatattaagcctagttctcgttagttgtttttcctgatcctctccctcctcccacccttcactaggccctggtttgtgttgctcctctctctctctctctgtgtccatgtgttctcatcacttagctcctacttataagtgagtacgtgcggttgtctgttcctgtgttagtttgctaaggataatggccttcagctgcatccatgtccctgcaaatgacatgatgtcattctttttttatagctgcatggtgtctctcggcttttttttttttttttcttgaaatggagtttcactctttttgcccaggctggagtgcaatggtgtgatctcggctcactgcaacctttgcctcctgggttcaagtgattctcctgcctcagcctcccgagtagctggaattacaggcgaccaccaccatgcccagctaattttgtatttttagtagggacagggtttcaccatgttggccaggctggtcttgaactcctgacatcaggtgatccgcccgccttggcctcccaaagtgctgggattacaggcataagccaccgcgcccggccttctctcagctttttaagagagcattaaactaaatggggctcctctgacaatttgtgactaccaattagctctcacgtttccatagactgttaggacaccttgtcctcactctttaaaaaaggcagacctggctctagctcccctgagtaagccacctccctggtccccagaaattacaaagtaagagggctgagtatgatgtagtatagtgggccaggtgatctggggagaaggaggcaggggtatggaaatgaaggagaaaggtgtggcgagggtgaatggtaggagaagggaaaggtgaggacaagaggagggggctcgtttttgtaggacactcccaggtggacctggacatcattacctagagcagtgttccttaaatgtgcccagataggaagcataattacaaaagtaagaacttgcattttcagagagctttcccccggaaattctgattcagcaagtctagagcaagggctatggtatctaaatgtttctgtttaacgagtgataccatgctaagtaaaatacaacttgtttaaaataagggagttcctgaattatgtctggcatacaatccaatccagatttcatggaatattggaatgcctggagatataacaatcttagaacaaaacatttgtaaagcagtgtagaaaaaaacaataaacaaaaatccaaaatatcttaattttgtccattttgagagcattaagcctaccctcagtagttgtccaagtttctaagagttagggtgaagacaggacatgactgatgcgcagtactgtgcaaccaaagctttagaaagggaactgggtaaagaggcgtgtcgccttatgccaccttgtggcagaattgggtagttaatgaagaccggctggaggtcgaatgacttgggtccttcaacaaatactcattaagtcatcatttgaaaaaaaaaatcacttaaaatctgagtctgttttctccttttaaaaaagattactatttgcttaaattatgtttttgatacaagcaatgagactttaaaagtgaaataaaatattaagtattctttttatcattgctaatgctgttttcccatttataagtgagggaaaaacttatttttccagggatattcctttttctcttgattaagatggtgaacagaaggtggctggtcagaaatgaatggggaatgcattcaatgagagagatctctgccatcctcctcttcatctattctattttcccaattcgctagagtgagacaggctactttgaagatgtcagatggctgactgaggtgctcagaaaagacagatctcaccagtagctgcagaatatggttacctactatgatggttaattttatgtgtcaatttcgctgggccactgtgcccaaatagttggtgaaacattattctggatgattctgtgaaggtgtttttgtttgtttgtttgtttgtttgtttttttggatgagattaatatttaaattggtagactaaagcagattaccctccaaaatgtaggtaggcctcatccaatcagttgagagccttaatagaacaaagactaacctcccctgagcaagaatgaattctgccagcagactgcctttagacttaaactgcaaatctttcctggggctccaggttgcaaacctgccttgtagattttggtttatccagccaccacaatcctgtgaaccaattccttataatgtccctctctctctttctcaaatctctttctacacacacacacacacacacacacacacacacacacacacacacagagttgattttattttctggagagctgtgacacctgtgaaggtgttagataactggaacttttgagaaagacatatatcccagttgctagagaatatggttacctacatggtgagaattgaaaggtactagaaaagtctgctctctttgtagaatcttctctaacactcaagtgtgggttgaagttaggggtgacctaactcagttgattggctccatttccctgagattctcttggttctgctcacccctatgtggtcgctccattctcaagaatgatctcaggaagcctccaacagtttcagcctcacacagaaaatctggaagataaaaatctgcttcaattctagtattcaaagaaattcaccctgattaaagtgtcaattgctgactaggactttggcttgggaaatggaacttagtatttaagacaatccttggagattggggtgaaatcagttttccctaagacttaatggaatcaaagtgctatatggatacatgaaaaaaatcctggttctgctaaggtgagggaaggggaatagctgttgggtagatcaccaataatgtccaccagacacttacgtagtaccagcaattgatttatcacaatgtaacacacaagtgatgatactcaaattaaactatactagtgctaaggaaccagtaaagattagtggggattatggtaaacaagaataacatgatctattaataaaagagagccacgccaagcgtggtggctcattgccagtagctgtggctcaggcctgtaatctcagcactttgggaggctgaggtggatggatcgtccgaggtcaggagtttgagaccggcctagccaacatggcgaaaccccatctctactaaaaatacaaaaattagccaggtgtggtggcgtgtgcctgtgatcccacccacttgggaggctgaggcatgggaattgcttgaacctgtgaggtggagtttgcagtgagccgagattgtgccactgcactccagcctgggtgacagagtaagactctgtctcgaaaaaaagaaaaaaaaaaaaaaagaagaagccactactttgctctaagcaatgtgaccatgcaaaaatataacccttctgttgcaagatcatcaacattttttagagaaactgataatttggatttttatgtaaaatagccatattttaaatgttggcaactaagttcatttttgttcttgtttttaaccacgcaggacagccaatactgtctaaaataaacaaagcataactgttggctaaatgcagtctgtgaacctctagttttctgggctagaaaaaccattacttgccattcagtagttctatgaatgaaaggcttgctaagagtagaggaaccaaagaagatgagagaatgagtgtcattgtctcatacaatgcttttcggcaggtgtgtccccactcacatgttctcaggctcccacttcacggaatgaaatgtgaagtccacttggggccagttaattctttccaagatagtcaaggtgttccactgccaggcaccaggaacacttgtttccctggtgttgaccatcttacttcatttacaggtaagccctagcaggtacagggacaaaagtcttcacactaacagaaatccagtgtagattagcttctttttttcccaagatgcctaaattctattttttaaaaaagatatagcgatcattcttccatttctagacccttagctgacgtcattaggtagtttatcatagttctgcgagacatacagcttttcattaataggttagattaattaccgtcctatcattaaaacgcatttagtttaactgaatggaaaatagcagtttgtcataaacttaaaaaaaaaaatcaatgcttaattagcttaaaatagactagtactgagatcagagactgattggcgtttatcttttccctggacaatttcttgttcccaaaaaagcacaagggcagtagttgtcactcctgcttacgcattagaatctagtggatggaaatgcggggtttggggggaggagatgaggggaacgcttttttaaaaaagcttttgtccaggccaagtgattctaatgtgtagacagggcagaataccgctccctgtgcgggggaaaaaatccccaacatctgaaattcctcaaatccctcagattctctccagaactcttcatttcagcacgtaggggtaccaacgaacaattttctgaggtgtctgaggctagtcatgtccccggagattgacgggaccgtcagccaatcggccgtctgaacgagtgatggcaaccccaatgacaagcaacagaatgaggaactttatccccgcagaaagaccagatcgcagtagcaaaggtcaacaagtcaacaaaagccaagggctctccgtcaggcatcagcgaggcccgagtactcttagaggtcgtagccaggagagggtcccgcgcttgcccagcgttgctagggaggcggcgcttgctcaagcttctcgtgccctctccgtacgtcacttccgcccggcggggtctcatagtcctatgggctgggttgaagccacttccttttttctttccctttttcctctccgtggccccgcctcccggaagttctgccttgtctccgccgcgggtcaggggtgagagctggaatctctgcacgggccttggtgagtaactgctgcgagttctgttcccgcgcggcgccagttcaaagaacttaggttagatcacgcttagggcccaacaggactgtgccaggcctcaggagtctccaccctctccagttttggggccgtcagtctcctgggcctgcaattatccacgctgaggctgaggtctttggcttttagcgagttggattgcagccttgttctgcttctgtgtcttctctctccaggcgaggtcctactgaggttgttgccagcgatagtcctctcctggagcttgaattggaagcagagtagtcttgttagtctcggtgatggctgcgttgtttcctgaagtagccaaagtgctttagcatccattccgcctcctttgagcaccctgggaggtaggcagggcagacgaaaaatatattcgttaatattgtgcagttgaggaaactgaagctcttggcgaattcactgtttcaaagcaacacggcctctaacaggcagaactgaaattcgcacccaggtctaactaacgtagggttgcataaaacagtggagagagcgtttggaaatagggaaaacactgcaaacgttaaagaagagctggggtttctgagtgcttactttgtgttcggctttgtgccaaattctttctataattatatcatccattttattttataataagcataggaagtatatactgtggttatttattcctgggttaggaaactgaggcttagagatgataactgacttgtctagtactaatgactttagtaggcatttcacagatctctttcagctctgtgattctttcaacactgtagtattaacttctggcataatcaaactgcccttttctgattttggcattacaggaagagagattccagaactttatttttggtctcttcaccctttgcccattgtctcatttcttatcaccattcttatcaccatcctatttagaaatttatagtcatgtaaatttagccttgactttcttttttttttttttttgagacggagtcccgctctgttgcccaggctggagtgctgtggtgcgatctcggctcactgcaagctccgcctcccgggttcaagtgattctcctgccttagcctcccgagtagctgggactaccggcgcccgccaccacgcctggctaattttttgtatttttagtagagacggggtttcaccgtgttaggcaggatggtctcgatcttctgacctcttgatccgcccgcctcggcctcccaaagtgctgggattacagacatgagccaccgcgcccggcccgccttgacttttactctacaatttaattttttttttttttcctcaaagagaaatatggagatggttgtggaattaatggatccaggttaaagggttggccagaaaagttgctagtttttactctattgttttactctattgttgctttgcttacatatattatgtcagtttctgcctttttttctatcaggaaaacgactgtcttcttctgccaaaatgtcaggaattggaaataaaagagcagctggagaacctggcacctccatgcctcctgagaagaaggcagctgttgaagattcagggaccacagtggaaacaattaagctaggaggtgtctcttcaacggtatgaggaaacagtgccatgaaagtgtgcttgtcttctgtcagttgcaacttgaaactaaaaattcatggaagctttctggagtatggggaagctatttgaaaagaagagggaaataaaacaggctgaaagtaggtaaaatgatgtggtagtcagttctagaggagaggtagattgatagttgttctttgttttcaaggtgtacttatattctttcgagaatctgggaaggtggtgcctgatacaacattaactataggtatttagcagtgggaagatacacatttatttttcattcactgaaaaagtcagtaccagattctaagagacagtttagcaatcattgagagtatggtgaagagtgagagtctgagaccagattgcctggagttgactctgagctgtaccacttcctagctggctgaccttgtgttatccttcctttgcctgttttcttgtctgtaaaatgtaattagagtacctgctacattagatttttatgcatataaaataagagtccctgttaagggctaacactttgcatttaatatagtaaatagtcaataaatgggaggcattcatagctaatattgggctagataatataatggtgcataacatagatattatccttgctcttatggagctgacaaaatgagtattatataccaaaatctcatagtaatgttatatatctgttagacatcagaagtttacaggttttgatctacgtcaagattttgcttttttgaaaatcagacatggggatgtgatattaaaatgttttacattttgtaaaatgctttacatttgtatggcttgcaaaaccacatctattgcttatttgattttgaggctgaggtttattttagagaggctgatttttttttttgagtcagaataataggaacattcatagtgagttgttgatgaagtgtcatttctgaggctgcctgaggttctggtacttaatattgctggcaggaagtgatttttgttttagcactgccttgcatcatgcattccaaaggcatttattcactcaatatataaatatttgttgagtatttgttatttgccagacactatcctttacactgaagacagcccctagactttagtttgtagggtagcactgacaagggaatagactgtttagagtggggtatgtgctgttgacagggataagcacatacttatgggaagcacatagcacacaccccagtgtggactttatccagaggcaatgaggagttagtggatagtcttaagtaggagactaacatgctctgacttgtgtttggagactatagaaaagcaaggattataaacaagagtccagctagcagacttttttcttttcttcttcttactctctttcgctataactgcatctctccaaaggtggggatctgaggcatgtatccactgatccccgctccaattggttgaaggttgccattgaaagcagtccctcctgtgcattttgagattgctgttaggagccagctgtgattgcgggacagaaaaactgagtctccaaagtgtgcttgaagtgggaacaatggcagtgtaaatggagctgtccaccacagctgtgctgaaatctggcaggctgacaggacttagcacagagtttttgctataggaggcctttgcagtaatcttaatgagaaatcatggtggcttggaccactgtggaggtagcattgataagatctgctgatggattggataactcacatgaaagataggagggaggatcatcccaggattttgaaagtaatggaatttttacttactgagctagagaagtgtatgagaggagcagatttttgggagtcatggaggatgaattgagtttggtttggtttgggacatataagtttgagatacttatttgacctctgaatggataggtagttaataagctggatactagagagaggtctgggctaaagctgtatatttgggaatcgtcattttgtaagttgtgtttacatctatgagactacagactcctttaatgaataagcataaagaggtctgctggggcactacaatattttcatgtcaaggaatgagaaaggactaatcaaagatacaaacaaagagggaccaatgaggtaagaggataggaagagagaatgggttcccagaagctcaatgaagaaagtatttcaagaaggagctgattaggtgctgctgatgtgttctcattcaggtttcagttggaacaaggggaataaagggaggactgaggtgttatatttaataatagttcactggagataccaaaacacctttgttggtgaaatagtggggatggcaccctgttttcagtgagcttaagagaatatgaggggagaggaattaggaaaaagagagtagagacaatgctttataaaggagtatcgctgtaaagtagatgactatataatgactgatcatggaatttaagttcagtaaagaaggaggtgagagaagtgaaaggtataggaccaatggattgtagatcctggagaggttaaagaatttttggagtaaggaaactggagagagtgagctggaaaaatagtggtagttgtgaagaatgaggtgtttgaaattgagcttatagaggacatgtaggtacaagtaagactaaatgtgggagttggtggctgaaggaggtagaagacaagatcattggtgaagaggaggtcagtgacttgatgattcaagtataggaaaggttatctgtatgggtattgaaatcattaagaatgatgacaggaaaagtattggagagtgataataaggtaggtgctaagtctttgtgaaatgtgaggaaacgacgtgggcatttacagatgaattcaacagagcatggcggcaggtggtataggctaatggcatgagctgcagaggtaggaggttttagggaggaaggtggggtaatggcctggaagtggcaatggaaaataaggaggatattcatccctctctggcttcaaggggtgtggaagagaaacagccaccactagagaagcctgcagggaaacagtttctcatccaagtttcagttagagcaagaagggaaaggcaatgttcagagaagagtttgaggatatagtttattaatagtgttaataaactggtacagtgggaaaactgttgactactttggcatattaggaatgttttaattaaagtggaaaagagaaaaatgaaacaaaaattggtggtgtaataaacaattgtcactttaaaataatgatttcattaattcctcagaaaagtaagactatttttccacatgctggttctttgcttgttatatcctccaatcccacctcccaccaacccctccctggtttgtcctagggaaggagctggagagagaaaaatattgagagggatgtgaaattactaatggagtgagggttttgtagagacagaagagaacaggatcctgagcacaagctgaggttttaagaatgtgtgcataattgtgttaatgggtcaaagagatggggaattgttttccatctgatggcttctattttctcattaaaataggaagtaaagccatctgttttgtatgatgtaaaagggggcagggtttggtagaggttgatgttgccttgctggagaatgggaaatagctcacttgataaagaaatatttctagacaaattataaaatctgtttaggctaagaattcattttgtaaaggcaccggtttcggtggtttgatgaacttctctagaagtctcagcatactgggtacaggaatggaatagccagataactggattaattcagattggggtttgttgacagagatagaataaaaggattaagggcagagaaccaaggaggctgttaggcaggtgtttgaaggaatgtactatatagcatatgattaagatatggaaggtagcagagatagaaggagaccgaaaaggagaaagaaaagaattcaacattctggagatcttgatgaggtaaagggattggtatattgggttaagggcatgagatacctggaaagacgtggtgtttttcagggaatgggaagttggaatataagatttcagatgtggtacagttccagataatgacaaaagtctgagatgtgtcttttgaagtgcatggctgaagcacagtggaggagataatgtttggagtgaaggaactggaaaaactgacagcctagatgctagaggattagatggtttgtccacatgtatggtgaagtcaccagatatattggcaggaactgggatagacagggacccaggtgctgaagtctttaatgaaggaaggatggtgcttacgagatagaagacagtgttgattggagtcgagggtgatctagctggatggtggccttaaagcagcattactttgtagatgtttatgtgactagaacagcgagatgggttgaggttctggtgtatttgtgtgtattattctttcctcacaccatcatatacctgttgtttatctcttctgcttctacttcttaattacttgtaagattttttaaaagtcaatagctttattcatagaaaataactaatgaataattgtgaccttgttgagtttaacggctcatttttcttatttctttgtggagactaatacgattggtttactgggcaggaggaactagacattagaacactgcaaaccaaaaatcgcaagctggcagaaatgttggatcagcggcaggccattgaagatgaacttcgtgagcacattgaaaaactggaacgacgacaggccactgatgatgcctcactattgattgtcaaccgatactggagtcaggtagctaacttgtttatttgttcagatttttatttgaccaatttagttctccttactgttctcttcatttccaaagttgtgtcctttgtttcttcataattgtacctacccttctccagtttgatgaaaacatccgtatcatccttaaacgttatgatctggagcagggcttgggagacctactcacagaacgaaaagcccttgttgtgcctgaaccagaaccagactctgatagcaatcaggagcgtaaagatgaccgagagagaggcaagtgttcgtgatggattctatcactgcatgctatctgggtttttaaagtagagctctgctttgaggctttccatttgagggaaaaaaaatggattttgttatttccagtttataattttggggggcttctttttttccccctgtgtcctcaggggaagggcaagagccagctttctctttccttgctactttggccagcagttccagtgaagagatggagtctcagctgcaggaacgtgtggagtcttcccgccgagccgtgtcccagattgtgactgtttatgataaattgcaagaaaaagtggagctcttatcccggaagctaaacagtggaggtgaggcaagaccctggaggccgggagtagtggaggaggaataagaattcatttttgcatgctaatttgtagtttgcaagcttacatatttatttttatttatttattatttactttttaagagataaggtttcactgtgtcacccaggctggaacacagtggcaccatcatagcccattgaatcctcgaactcaagcaatctttctgcctcagcttccgaatagctaggactataggcacgtactaccacacctggctaatattttaacctttttgtagagaggaagtcttgctatgttgcccaggctggtctcaaacttggcctcaagagatcctctcttctggcctcccaaagtgttaggattacaggcatgagccactgtgcctggactatatattttaattaaatttttagaaattctaaccttcagtgttactggtaatgtcttcattatggcatattaatcttttatcagtgcttctcattttgagccacatgacagtcctttaataagctgaggaaagagtttatcagctctatactgatatactctattaatgacagttttgtaaatagcagaattaactttattatttaataaacagctctaatatctggatctgtttatcgtgtatgtaggctattgatttatagtgataatactttattttaaataacaactatattatttaattattagttacagaattttgacttgaaaaagttaatttttacttaacttatttttcattatcgctaatgtttttaaaaagagttggtgcaggttttagagttgacagatgatctgtatggttaaaaggattattagaaaatattctatggatgaaagagtatttgaaataaaataattatttgggataattgtgttactcagagttaatgcaaaaatttaaatttgtacagtaaagtatttgtgtagctaggttacatctttagtcatttgtggcataaataccttgctcaaatgcaaaaaaaatgccttgatttcatgttttcaataataatcatggtctagttgtaatatcttaatttccctgcttatcattaagatgtttaacctttcatttctgaaggaaataagttgaatgtaatggaggttgaaccattggatgagcatataagaattgtattattctgtaattttgcttttaagggtaattgggctaagttgtcaacagaattaagcagcttgtagaaggcctgtgaaaatttggtcacgggtttcttttgcttttccattagattatgcatttctgtattttattataaggaaaacagatacttgtttaaaaatatacaagtcagaaatacaaataagtagactacaaaagtttccccattctcatttctcaaaagataaccattctaaacaatgtgttttatgtcctctcagacttttgtacttttgtattaatatcttacatctacttgcatgtccccagctaaactgtgtcttggttcagtagtttggctcactcttctttgtttctctagtttctagcactgcatctggcatctagcagatgtttagtcaatggggaatgaatggatgtgaacctccctgtcacctaatataaaataatggtgctttgtgtgtgcacatatgcttctttctccttgggctctaattgaatagttagaaggtattgttaaattttagtaatatggtaattaatatgccatgtgcatagactatgttaaacttgatttcataaatgaatatcaagtgaaacaattgttttatttaaaaagggaataaaatgagtagtatatcaaacgactttaaaattactatttaatggcatgcattttaaggtcgggtttaagttaaaaagtagaaacattacaaatagccatgccattatttgtaacacaaaaggcaattgccattggtaagctgaactttctaagagataaagatgtataaagtatgaattatagcatcagttgtaacttgtttgaaagttcatccccctgacttagactgaaaattgacattcctcaaattcctaggacatcatcaatacagtagtttctacttccccattccctgtggaatttctaccacgccattcctcaataacactatacagtcttttatatttagggtaattcattatttggaggtttggagttgtgttgtgttttacaaaatcccctatgatatgataggccttctagagtaaggtaaggccttctagagcaagtataggccttatagagtaaggtctataaattcatctaaccctgccagagcggcactgtctaacctgccacggcagtactgtctaaccgtgccagggcggcactgtctaacccttccagggcggcactgtctaacccttccagggcggcactgtctaaccctgccagggcggcactgtctaacctgccagagcggcactgtctaacctgccagagcggcactgtctaactctgccagggcggcactgtctaacctgccaaggcagcactgtctaaccctgccagggtggcactgtctaaccctgccactgcagtactgtccaaccctgccagagcggaactgtctaacctgccagggcggcactgtctaacctgccagagcggcactgtctaaccctgccagggcggcactgtctaacctgccagggcagtactgtctgtttgtttggtctttgattcaaaagaattgcatttatgggcttgtttataaattcactaaacatttattgaattttattgtattctagccctgtcctcagtgcttaggatattgagaggactaaaattcagtctctacttcttaactcaggttatgaatcagaataaccttgggagttttctgagcatattcttatttttggctttgcccatggaggttcttattaagtaggtatgagataggtcctagggaaatgtctattttaaaagttccacaagtgattctgatgggcaagcctagcttgaaaaccatgaaaaccaccatatgaccaacctgttctgtattgatactaagagtaatgccaagaggtgatatgagaaagcatatttttcttcctgataactctctttgatgggtggtatatatcctgagagtatctggtttcatttaattacatttggatttcagctatagtatttgcaactctaattttaaacatacgaacttggtgtaataagttctatggatttacctacctgctttgtaaatagtagtgtacattttggtttttaagcttcagaagtgcccctaacatagtatttcagaatatatgatatgagaatatgtgataagagcatatgattcttgctttgttattcaggctggtcttgaactcctggcctcaagtgatcggcctgccttggcttcccaaggtgctaggattacagcgtgagctgctatacctggccaaggatacacagttttaaaatttgacactataggccaggcacggtggctcacacctgtaatcccagcactttgggaggctgaggtgggtggatcacctgaggtcaggagtttgagaccagcctgtccgacatggtgaaaccccatctctactaaaaatacaaaaatcatccgggtgtggtggcatgtgcctgtaatcccagctactctggaggctgaggcaggagaatcggctcgaaccctggaggcagaggttgcagtgagccgagatcgcgccactgtactccagcctgggcgatagagcaagactccgtcttaaaaaaaaaaaaaaaatgacactctagatgctaaattaaagtatagttcttcttccccagataatctgatagtggaggaagcagtgcaggagctgaactctttcctcgcacaggagaatatgaggctacaggaattgacagatcttcttcaggaaaagcatcgcaccatgtctcaggaggtacttaaccaaaaaggagagatggctgtgtctagtgggctgtggcagatgttgacttacaattctgagcacctcaaagattaccttactctagaaggcctatcatatcataggggattttgtaaaacacaacacaactccaaacctccaaataatgaattaccctaaatataaaagactgtatagtgttattgaggaatggcgtggtagaaattccacagggaatggggaagtagaaactactgtattgatgatgtcctaggaatttgaggaatgtcaattttcagtctaaacttgggtgcaaataatgccatgattaaaccatgccaagatttggacatttatttatttacacaaaatgatcaagataaagtgatgataggccttaaatgacttttctgatacttctgatgatcattttgatttagttcaaaatatattctactggaatttgccccaccttagtttggccactgaattcttatgctaattagtaatttagtagttgccatttacttagtgcctagaatttaagcactttatgaatgttatctctaatggcaaaacaactcccattttattgccaaagaaacaaattcaaagaggttagtgattattctgagggcacatagctagaaagtgattgagctgtgttgtgactgtaggtctgtttgacttcaaagctcttgttcttcatatgcctttgtttactaaaccccagtgttaaggtccatgctggcctggttgcatgaatatcatctggggaatttattaattcatatggattatcctggaccttcaaaggggttagaatgtagtagcccttataaataaactggagtctagtaagaaaatagaatatttttatcatgttttaagacattgactaggtgctaccaagatggagaggtcttccttttctagccctttgacaaatctcagatagtattactaacctggagggcagttgtttgctaaactgtgatgtccttgttggctctcatggctggctgttgatgctgcctgtcagctgggttaattgtctactgggatacctgcagtttgcctctccatcatggtagtctcaggatggttggaatttttacatgttggctgacttcttccagtgagcatcccaagatcaccaggtagaaccttcatggcctttctgatatagcctcaaaattgtgtagtgacatttccattgggtctctaaagttgacccagattcaagaggagggaacaaagatcccacctcttgttcagaggactttcaaaggatttttgtgtcatgttttaaaacctagcacaaagggtatatatagattaatgtgaacttgtaatagtttagtagttaaaatactaaatagtgttagctggtgtatagctcctaaatagagtatctgactttagattatagtataatctatactgtattgtatctgactctagattgctctggggtgagcttaaaaaagagtatggaagttttcttttgttgtgaatgaatggattaccttttgtgggactgtggagagaaatttgggggtaaaaatggtttttttgaaaaaatatttatcttacaaaacaaaagatactatttattatctcttaaaaaattacaaaatttttatgagtttgtggtctgtccagagaaatggtgcttttcagaggtagaaaaattgttgaatcttaggtggtcttttctttgtgtgagagttcttatagactttagacttaaagtttgcatgattataactgacacagaattgttggaggaatccgtgatttcatttttgtaatcatgcattgggaagagggtgaagcatcttctatttgcctcttttctataattactcataagcaagggttaatattatggaatttggtctttttttgctatatgtttctgaatgtttgtctttgggatgtagttctccaagttgcagagtaaagtggagacagccgaatcacgagtgtctgtcctggagtccatgattgatgacctgcagtgggatattgacaaaattcgaaagagggaacagcgactcaaccgacacttagcagaagtcctagaacgggtcagtgctgttttatggcttggagactagaatcattttaaggagtgttctcaggaagactcaccttggggcatggtatttgaggaaaaaatctcatcctttgaaggtacattggttatagactgaaatcttaagagtctctcactaaagaatctttgtgttctctgtaggtgaattccaaaggttataaggtgtatggagcggggagcagtctgtatggcggcacaatcactatcaatgctcggaaggtaaaatcagtgactcaggacatgttttggactgtatgtcagctttcatgcttaggtacttaggactgtgttcacaagtgacatcatggggttttgctggaatagcgaatcagtgaagaaaggaagcttagaaatgatttaagaagaatacttatttattctctatttttctgcttctctgcagtttgaggaaatgaatgcagagcttgaggagaacaaagagttggctcagaaccgtctctgtgagctggagaaacttcggcaagactttgaggaggtcactacacaaaatgaaaagctgaaggtaggaacgcatccctgaagggcagtaaaatcagacgttctgctgatcaactcacgtatatacatagttgtgaatctgcgtattcatgagggataagaaaaatgtagacaaaatccaacatccttttatgataaaactcttaacaaattaggtgtaaagaagtgtacctcaacataataaaggccatataaaacaagcccacagccaacattatacccaatggcgaaaagttgaaagcttttcctttaagatcaggaacaggataaagatgctcgctgtcattacttttgtcctagccagagtaattaggcaaggataagaaataaaggcctcttaatcagaaaggaagaggtaaagttgtttctgtttatagatgacatgactttatatatagaaaaccttacaggctccacgaaaaaactgttagaactataaatgaattcagtaaagttgcaggctacagaatcaacatacaaaaacaattgtgtgtctatataccaacaacaaactctataaaaaagaaattaagaaaacaatcccatttacaataccattaaaaaaaattgtgaataaccttaaccagggagatgaaagaactgtacactgaatggataaagaaatgtggtgtgtgtttgtatgtgagtgtgtgtgtgtatatgtgcaacagcatggatatatttagaggacattatgctaactgaaataaaccaagcacggaaaggcaaatactgcatgatctcacttgtatgtgggatctaaaaaagtcaaaatcttggaagcagagtgtagaatggtggttaccagggttggggaaatcggaagatgttggggaaaaggtacaaagttttagttatgcaggatgaataagttctggtgatgtgtagcatggtgactataattaatgctgtattgtgtacttgaaatatgctaagagtagatcttaaatgttcttgccacacacgaaaagataactgtgaggtgaaggatttgttaattaggtggattgtggtaatgatttcacagtgtatatgtatagcaaaatgccacattgtataccttaaatatgtataatttttatttgttgattataccttaataaagctggggggaacaaagaaaaaatgttaagttttgttgatatatctacttctttacttacatatttacttattatatgtactctgccttgccctgaaaaggatttaaagcaacatacaaagatatgtagactaaatcaaggtgctgtaatgtaggagttgttgagaaaaatgagaagtagggtaaactagggtgaggatccaaaatgcattaaagtggggcttgtatacaagatgtttgcagggggcatatatatactgtggaagggaggccattcacatgtcagtgcttaccgaagtgattccacaggtttggctctgcagttttttgctaccaaaacagagaaagaaacacgattggtgatcctgttggtcttcaaacctgcccagaagaattttcttcttaggttgttagtgtaggggccagccccacagggtcggtgggtctctccctgtgtgcggagacgagagagtgtagaaataaagacacaagacaaagagataaaagaaaaggcagctgggcctgggggaccactaccaccaagttgcggagaccggtagtggccccaaatgccaggctgcactgatatttattggatacaagacaaaggggcaggataaggagagcaagccatctccaatcgtaggtaaggtcacgtgggtcacatgtccactggacagggggcccttccctgcctggcagccgaggcatagagagagaggagacagagagagaaacagcttatgccattatttctgataattagagacttttaatactttcactaatttgctactgctatctagaaggcagagtcaggtgtacaggatggaacatgaaggcggcctaggagcgtgaccactgaacaggttaggcctccggataacggcggacgagcctgactaatgtcaggccctccacaagaggtggaggagtagagtcttctctaaactcctcccgggaaagggagactccctttcctggtctgctaagtagcaggtgttttcccttgacacttacgctaccgctagaccacggtccacctggtaacgggcgtcttcccagaagctggcattaccgctagaccaaggagccctctggtggccctgtctgggcataacagaaggctcgcactcttgtcttctggtcacttctcactgtgtcccctcagctcctatctctgtatggcctggtttttcctaggttatgattatagagcgaggattattataatattggaataaagagtaattgctacaaactgatgattaatgatattcatatataatcatatctaagatctatatctggcataactattcttgttttatattttattatactggaacagctcgtgtcctcggtctcttgcctcggcacctgggtggcttgccgcccacatcttaggagaagaaaagagattctggaagtctttctcactcctctttcgatcatagtcatctctattttacaagttgtttgtaggttaaatgatatgaataaagatgtttgaactgaaaaataaaaaacaaaaacaacctaagttaaatcagttaaaagtgtttgagtaattaaatcagatagttgcttaggagaggcataactatttttgataccctgtcaatttttttctctgtcactgttattaaagagaacaagttagtgactggggtcctcaactatgtttttaaaataagcatcctgacaaatttcactcttctggtggctcatttgacacagaatataaaacacatatcaaaacaattctaggaggaaagaatacagtatatccaggtaccatctcctagttagtctaatttaattttggggtagattttacataactacagcaatgggtagataacttaataatctttataaaattgtctctcttgtgtaggacatcagtgagttcaaaattttacttcctgtctagcgtctggggcaatgctagattctgcttctgactttgctttgggccctcctaaggtggaattgcggagtgcagtggagcaagtcgttaaggaaactccagaatatcgctgcatgcagtcacagttctccgtcttgtataatgagagcctacagttgaaagcacacttggatgaggctcggaccctgcttcatggcaccagaggaacccaccagcaccaggttgagcttattgaggtaatagccttgccttgtcttttgtatgtaagctttcttgcctcctaaattttacaattttactccctcatgtgcaattaatctctcattcattcagctgtcattcatagagtggcagtaggtctttactctggtaggtactgggcatataaagatgagatgacaaaattcctgccctcacagatcttgtagtctgcagtaatgggagaatagtatccattagaatgcaatgtggtacaatggcagcatagccaaaagatgtgatacatgagaaaagagtgtctgatttgactgtggaagtttcctgattccacttaaaaaagtaaggtataaatattaaggataaattattggtagttgaaagtaggagaagaagaattcccggcatgagaacagcacatataaaggtatgagagagcatgagaaatagtttaatatggctagagcttacgtgtatgtgagaaaatagtgggtagaagctgcaaaattacttacatttcttaaacaaaaagcatataatggcaccagtagatgatttttttaaaagatagaaacttttattcatatgttcatttctgtatcttccatagtttttaaggtaatggttataatagttggtcttttaatatatgcctgacaaatgaattgaatactattttacatatgtttatatactgttttatagtttagttctccaactaaattctaatattctcagaattggtggccattttctttatttttcagtatcctgtcagtttccaaattagtcttttgtagatatctggtttcattacgtatagattgaactggaaattttcagagtaatccatagaatatgatgatatttctacattttaataagaatttttttattggttcctttatctgtgtgtagcgagatgaggttagtcttcataagaagctgaggactgaagtaattcagctagaagatacattggcccaggtccgcaaggagtatgaaatgctgaggatagaatttgagcagacccttgctgccaatgaacaagcaggtataatgattctcactccatgctgtagtttgctcttaataccttccttgaaagatacaacacagaccccagggtttgttaatgctgacttcaactcagaagtcataagtaccttaaatcctataattcattttggttcacagcctggatgtttgttttttaactcaagttgaccagttttgttttcatcttctgagaaggaatcttttatttggtaattctccctatttctcagtgcctcctgatgtgttctgttctttctctccttgtgcctttgcccttaccacggttcctcataacattgttgttcctgtatttaaggccctataaacagggagatgcgccacctcatcagtagcctccagaatcacaatcaccagctgaaaggggaggtcctgagatataagcggaaattgagagaagcccagtctgacctgaacaaggtaaccagagggaatagaataaatatcatttgctattaatgtcgtaaagctgcttttgaatgaggtcggcaatgtggttatcataagagatgtgcatctttcttttctttattctcccagacacgcctgcgtagtggtagtgccctcctgcagtcccagtctagtactgaggacccgaaggatgagcctgcggagctaaaaccagattctgaggacttatcctcccagtcctcagcttcaaaggcatctcaggaggatgccaatgaaatcaagtctaaacgggatgaagaagaacgagaacgagaaaggagggagaaggagagggaacgagaaagagaacgggagaaggagaaggagagagaacgagagaagcagaagctaaaagagtcagaaaaagagagagattctgctaaggataaagagaaaggcaaacatgatgatggacggaaaaaggaagcagaaattatcaaacaattgaagattgaactcaagtaagaaccacatttagagtaacagtttcgactgaaaagctaagattaagacatcatgcatgaaatgtttggttgatggcatggcttgtctgatcgttttaatgttttagattgtacaattaatttggtttcaagtcgtgttcaagtgcacagccaaaatggcttgcatggctatttagtactttggttcagtgatcgagtatcagcaaaccgatgatggtagccttatttttatgaatccaaattaaggaaaaggatgtcatgattgaggtaatacttctgagaattattgggaattaactactgctcttcactggatttgagcagattgctggcgttaattgtaatttaaatgatattaagtggagtatttatatatcactgtaacttgaacaatatctgatctatttgcctgagagttaactggtttgtgaatatgccatatctttcttaggagatttactcctatacacattgacacactaagatagacctttaacttgttgaatttttctgtgtcataaccttatgcattggcccttctcctgtataaccaataacttctctggcagaacggcttacttcttgctccttactttctatggttgatcctttgttgatgtttggacttgagagaccactgtgctcaaaatgcttgaactcttttggtatataaaagtatagttaagaggtttagtaatttaataagaggtgaagttttagtctttggctgatggttaatcactcagctgtcaaatctaggattaacagtatatctcagactttcaaatttttcccttttatttctccctcttgaactctttaaggcaattttttttttttctggtgtggtatcagaatcatctgagtgacttgtttaaatcacttgtttaaatttttgaactccatccccagacctactgaatctcagttacccagggttgggggccacagaaatttgcctatataacaagtacacaaatgtctgttttataactttgttagaggactttgaagggagaaatgattcatttttatacagcttacttttctgtactttctaagcatatccaaaagtcttttgatagtctgtgcaaaattttatcttttaggtgtgatatgaaatgtaaaatgaaactgttttaaaatattctgctcaatcaaaattcccttgctctgatgacctttattttcttattacattgttcccctccctctactacgcctgtcataggaaggcacaggagagccaaaaggagatgaaactattgctggatatgtaccgttctgccccaaaggaacagagagacaaagttcagctgatggcagctgagaagaagtctaaggcagaggtattctagtctgctattacctgtccttctggttaaaatcttcatttgtgggattttcctttatacttgccaacgatataatttctttctttatctttaaaataagtgtttaagtgcaacattttctgccttttcaaagaccatctgaagtagagattttaaaactctccataggatggtaaaatatatctgaattactggggttatgagtaggctttccaaagtatgtattccttgtttttcctatgtaattcattgctacagggataatctttttcattacttttgggaggaatgtcttatgctcttaaaattttgaggcctaaaaaaaaggatgggaaccactattctaaagaaagttacctgtgcacttctcaaaagtgttgcttatagaagcatgtcatagtagaatggagtgatgttaaaacagatggtgttatgtaatgttttagtatattatgtaccttgttctataattctgtaaagactcttttggtattatgaaccttctatctttgcacagtattaattgatttttgaaaatgtgttataactttttatttttgtgcaattcctttcctcttatagttggaagatctaaggcaaagactcaaggatctggaagataaagagaagaaagagaacaagaaaatggctgatgaggatgccttgaggaagatccgggcagtggaggagcagatagaatacctacagaagaagctagccatggccaagcaggtggactcactttctttatttaattgactttttgagtaaatgttacttgacaataagttattgccagtgaaatttgcttttttattttggtctttttttgattgttaatgtgtatttttcctttttgtgtgtgtgttttaattcttaccttcaagtcttttatctttctgttattttgttttgtgtatttgtgaggcaagaaatttacttttatttaaatggacatttattgaagatctagtctttctctgctgttgttcagacagttattgaagatctagtctttctttgctgacctggaattaagggttatagtgaatataaaatgaaaaataagacataagattttatatacattatgattacaaatatatgaaactaagaaaactatgcttataaatatatatcattatatatttctatgtagtacatatactacacagaaaaactatgcttataaatatgtgatttatatataataaggatataatctattaaccaatataataacattgattaagcagtatgttaactatggctattttggggtcatagaactatagagattgttctcctccttataatgaatatgtatgtatttttaaatgccagggaatttttattaaaattcaataataaagatactgaaaatgcttgaaaaaaccatatatgtattctctgttagtacaccttcattgtttctaagaaatagcaaaataacagtgagatggagtaggtttaatggtaagttgatcatgaagtgccttgaaaagaagaacttcattagatcctatacacattccttttgttaacaagtgtaattttgggctgggcgcggtggctcatgcctgtaatcccagcactttgggaggccgaggtggatggatcacctgaagtcgggagttcaagaccagcctgaccaacatggagaaaccccatcactattaaaaaaaaaaaaaaacaaaattagctgggcttggtggcgcatgcctgtaatcccagctacttgggaggctgaggcaggagaattgctggaacccaggagtggaggttgcagtgagccgagatggcgccattgcactccagcctgggcaacaagagcaaaactccatctcaaaaaaaaaaaaagtgtaattttgacttttcttaaatctggtaaatgccacttttttttttcttccctctctcttaaggtaattatcaggaaattatactattataggttctagaacaagtaaaaagaaagacactatgttcttgtatacgatgactatcttaaaaatgttcagtctttctaagtttatgtattaatataatgtgatctcataaaagtgctttttttaagttttgcttttgtttattttggtactagaagaactggttttaaagtacatgtggagaagtaaacaagagtaacaagagaaattgaaaaagaacagcactggggtctcttccatatattaaaacataaagtttctgtagatgaaatagcttgggactactagacaggctattagaactgaatagaaacttgagaagtagttgaaagtacacatgatacttattatgtgctaaatacatagttttaaatcagtggggaaaagaaaaactgtgacatgtgatgggacaaaattaaaaaaaataatgttagagaaaagttagatacatacttgaatacactaggatgatttccaaatggatcatagatatgatattttaaaaaatgcatccatcaaaaagctagaagaaaaccattaaattcctttataatttggagtggagacctttctatgaataaaaggctagaaaacatgaacaaaaaattgataattttgagttattttttaaaatgatgcaaaacttctacactgcaaaaaacactgttagcaaagccaaaagattaaatgacaaaaagtaaaaaatatttttaacttttattacaaagaaggcttatctgatacaaaaaaaactctccaaaatagggaaaaaaactcaagaatccagtggaagaataggcaaaagaaatgagttggttatggaaagaatacaagtggtcttaaccatatgaaaagatgctcagtctcacttaaaatgagatagatataaagtaaagctattattagataccagtcttcacctatcagattgttacaaggctttagatgtttgcaactgctggaaatcctgtagatccagtattttaattgtggaaaagcatgagaaaatgtgagaggttatgatggaagtactcttaaccaattgctgcttgatccgtttgtctagattaaggtaaatacaattattgtctaatttaactgacgttgagtacagatcaactaataagtatcagaccaacaattggtgccagtgacttcagataatagagcttctgtatgcctagtgacaaaacacaacttcttaaaactctgtcactaaattaatttatatctaaatgaacagtgggaaaatttagtttcctgtgctcttccattgaagttggaagattcttctaaaatcaaatctcttccttcatcctttaggaagaagaagcactcctctctgaaatggatgtcacaggccaggcctttgaagacatgcaggagcaaaatatccgtttgatgcagcaattgcgggagaaggatgatgcaaatttcaagctcatgtcagagcgtatcaagtccaatcagatccataagttgcttaaagaagagaaggaggagctggcagaccaggtgttgactctgaagactcaggtaattaggatgagtagagctttctattctgttgaaatagggtgctttctacatgatgatataagtaaaagaatgattattgtggcacatttttgtgattggaaaaaaatttgaaaactaaatgttcatcattagggtattggtaaataaattatacatctctactgttattcctacaaaagagtacagtgtacttgtcaaatatggatctgctaatatggaaacatgtctgaaataaaatcaagtgacgtgttttgttatcctttttgcgttaaagtatatgtttacttgtgttcctgtgctgtatattttaaaaatttctggaaggctgcatgagaaactgttagaattgttacttctggatattgggatgagttgtgggtgaggttaggaggtatgtgtgattttacttttttttttttttttttaaatttccataggttttggggaacatgtggtgtttggttacatgaataagttctttagtggtgataccaagattttggtgcacccataacccaagcagtgtacattgtacccagtgtgtagtctattgtacccagtgtgtagtctgttgtcccttgcctccctccgccaagtcaccaaagtttattgtatcattcttatgcctttgcgtcctcacagcttagctcctacttatgagtgaggacatacaatgtttggttttccattcctgagttacttcacttagaatattggtctccaattccaattccatccggattgctgtgaatgccattattttgttcctttttatggctgagtagtattccatggcgtgacttttcctctgggtagatacccggaagtgggattgcggaatcaagtggtaggtctacttttagttcattaaggactctccatactgttttccatagtgattgtactagtttacattcccaccaacagtgtaaaagtgttcccttttcatcacatccatgccaacacctattattttttgattttttgattatggccattcctgcaaagtgaggtggtgttgcattgaggttttgatttacatttccctgataattaatgatgttgaacatttttcttatgttcgttggccatttgtatatattcttttgagaattgtatattcatgtccttagcccactttttggtgggattgtttgttttgttcttgctgatttgtttgagttccttgtagattctggatattagtcctttgttggatgtatagatttttttctcccactctatgggttgtctgtttaccctgatgattatttcttttgctgtgcagaagctttttcgtttaattaagtttcatctatttatcatttcttttgttgcatttgcttttgggttcttggtcatgaagtctttgcctaagccattgtctagaaggatttttccaatattgctttctagaatttttatggtttcaggtcttagatttaagtctttgatccatcttgagttgatttttgtatagggtgagagatgaggatctagttccattcttctacatgtggcttgccaattatcctaccaccatttgttgaatagggtgtcccttcccactttatgtttttgtttggtttgtcaaagatcagttgactacgtatttggctttatttctgggttctctattctgttacattggtttacatgcctatttttataccagtaccatgctgtttttgtgactatggctttatagtataggttgaagtcaggtaatgtgatgcctccagatttgttcattttgcttagtcttgctttggctatgtatgctcttttttggttccatatgcgttttaggattgtttgttctagttccgtgaagaatgatgttggtattttgatgggaattgcatttcatttgtagattgcttttggcagtatggtcattttcacaatattgattctacccatccacgagcatgggatgtgtttccatttgtttgtgtcatctgtgatttctttcagcagtgttttgtaatttttcttgtcgaggtctttcacgttcttggttaagtatattcctaagtattttattttattttttttgcagctgttgtcaaagggtttgagttcttgatatgattctcagtttggttgctgttggtgtatagcagagctctgatttgtgtacattaattttgtatagtgaagctttgctgaattcatttaccagttctagcacctttctggatgagtctttagggttttctaggtatatgataatgtaatcagcaaacagtgacagtttgacttcctcattaccaatttggatgccttttatttctttctcttgtctgattgctctggctaggacttccagtgccatgttgaatggaagtggtgagagtggcatctgtgtcttgttccagttctcagggggaatgctttcaacttttccttgttcagtataatgttggctgtgggattgtcatagatggcttttattaccttaaggtatgtcccttctatgctgattttgctagagttttaatcataaaaggatgctggattttgtcaaatgctttttctgcatctattgagatgatcatgtgattttttaaaaattctgtttatatggtgtatcagatttattgacttgtggatgtcaaaccatccctgtatccctggtgtgagacccacttgatcatggtggactatctttttgatatgctttttgaaggcagtgtgagaaactgttagaatggttacctctacatattgggatgagttgtgggtgaggttaggaggtgggtgtttgtgattttactttttacactttaatattgtttgattctactttgtgcattaatttcaaaaaagactcttttagaatgtctagccattctgaaggaaatactcttggacttttgtttgagttctaatttatatgttatagtatgaattgccaggttttaagcattagcatgcattctctatttttggcaatttggaaaagaatcttttcagtcatttttcagactcttactgaatcttccacaatattttatattaaaagtaaagctttcagttatcatagtcttgatgtattttgaagggttcatgggcaaaatcagtaatagtttgagatttctaacatactgtattttgtgggcttatagattaacagaatagttttttttctttttttaatcttttcatttgtgttaaaatctgattttctgttcaaaggttgatgcccagctacaggtagtaaggaaactggaagagaaggagcatctgttacagagcaacattggcacaggggagaaagagctgggtcttaggacccaagccttagagatgaataaacgcaaggtatgattgattaatctaatgatggttagtctcagtggaacaaataagtataacactgttgagattgtaagttcgctttattccttcaacttgggctaacattttgcctcactggcaataataggtgatacaatggtgtcacttatttgtacatcctacataggcaatggaggcagcccagcttgcagatgacctcaaagcacaactggagttggctcagaagaagctacatgattttcaggatgagatcgtggagaacagtgttaccaaagaaaaggacatgttcaatttcaaacgagcccaggtaaaagcagttgtcttttcttgtcaccttttaggtgttttctgaggtcggaagtgacccatatcatgaaagaatcattagtccaatgtatgtcatttcctactagacttgaggaagtttgttgagggaagagagtaagtctgttttcttcactgccatatcctcagactcttttatggtgccttgcacctagtaggcacaaaataaatatttgttaaattaatgaattagtaaattgttaaagaagtaacagcatagcagcagtagaggattttcaagttcttgtataatgtctctatttttgtcatgctagctgtttctcatgatgtctttctgtctttatccgtaagtctctgaattattttaaaccgttctaccttcagct

SEQ ID NO: 990 - DNA, 2928 bp, Homo sapiens
  source 1..2928: mol_type = genomic DNA
atgtcaggaattggaaataaaagagcagctggagaacctggcacctccatgcctcctgagaagaaggcagctgttgaagattcagggaccacagtggaaacaattaagctaggaggtgtctcttcaacggaggaactagacattagaacactgcaaaccaaaaatcgcaagctggcagaaatgttggatcagcggcaggccattgaagatgaacttcgtgagcacattgaaaaactggaacgacgacaggccactgatgatgcctcactattgattgtcaaccgatactggagtcagtttgatgaaaacatccgtatcatccttaaacgttatgatctggagcagggcttgggagacctactcacagaacgaaaagcccttgttgtgcctgaaccagaaccagactctgatagcaatcaggagcgtaaagatgaccgagagagaggggaagggcaagagccagctttctctttccttgctactttggccagcagttccagtgaagagatggagtctcagctgcaggaacgtgtggagtcttcccgccgagccgtgtcccagattgtgactgtttatgataaattgcaagaaaaagtggagctcttatcccggaagctaaacagtggagataatctgatagtggaggaagcagtgcaggagctgaactctttcctcgcacaggagaatatgaggctacaggaattgacagatcttcttcaggaaaagcatcgcaccatgtctcaggagttctccaagttgcagagtaaagtggagacagccgaatcacgagtgtctgtcctggagtccatgattgatgacctgcagtgggatattgacaaaattcgaaagagggaacagcgactcaaccgacacttagcagaagtcctagaacgggtgaattccaaaggttataaggtgtatggagcggggagcagtctgtatggcggcacaatcactatcaatgctcggaagtttgaggaaatgaatgcagagcttgaggagaacaaagagttggctcagaaccgtctctgtgagctggagaaacttcggcaagactttgaggaggtcactacacaaaatgaaaagctgaaggtggaattgcggagtgcagtggagcaagtcgttaaggaaactccagaatatcgctgcatgcagtcacagttctccgtcttgtataatgagagcctacagttgaaagcacacttggatgaggctcggaccctgcttcatggcaccagaggaacccaccagcaccaggttgagcttattgagcgagatgaggttagtcttcataagaagctgaggactgaagtaattcagctagaagatacattggcccaggtccgcaaggagtatgaaatgctgaggatagaatttgagcagacccttgctgccaatgaacaagcaggccctataaacagggagatgcgccacctcatcagtagcctccagaatcacaatcaccagctgaaaggggaggtcctgagatataagcggaaattgagagaagcccagtctgacctgaacaagacacgcctgcgtagtggtagtgccctcctgcagtcccagtctagtactgaggacccgaaggatgagcctgcggagctaaaaccagattctgaggacttatcctcccagtcctcagcttcaaaggcatctcaggaggatgccaatgaaatcaagtctaaacgggatgaagaagaacgagaacgagaaaggagggagaaggagagggaacgagaaagagaacgggagaaggagaaggagagagaacgagagaagcagaagctaaaagagtcagaaaaagagagagattctgctaaggataaagagaaaggcaaacatgatgatggacggaaaaaggaagcagaaattatcaaacaattgaagattgaactcaagaaggcacaggagagccaaaaggagatgaaactattgctggatatgtaccgttctgccccaaaggaacagagagacaaagttcagctgatggcagctgagaagaagtctaaggcagagttggaagatctaaggcaaagactcaaggatctggaagataaagagaagaaagagaacaagaaaatggctgatgaggatgccttgaggaagatccgggcagtggaggagcagatagaatacctacagaagaagctagccatggccaagcaggaagaagaagcactcctctctgaaatggatgtcacaggccaggcctttgaagacatgcaggagcaaaatatccgtttgatgcagcaattgcgggagaaggatgatgcaaatttcaagctcatgtcagagcgtatcaagtccaatcagatccataagttgcttaaagaagagaaggaggagctggcagaccaggtgttgactctgaagactcaggttgatgcccagctacaggtagtaaggaaactggaagagaaggagcatctgttacagagcaacattggcacaggggagaaagagctgggtcttaggacccaagccttagagatgaataaacgcaaggcaatggaggcagcccagcttgcagatgacctcaaagcacaactggagttggctcagaagaagctacatgattttcaggatgagatcgtggagaacagtgttaccaaagaaaaggacatgttcaatttcaaacgagcccaggaggacatctctagacttcgcaggaagctggagaccacaaagaaaccagacaatgtacccaagtgtgatgagattctgatggaagagattaaggattacaaggcacgcttgacctgtccgtgctgtaacatgcgtaaaaaggatgctgttcttactaagtgttttcatgtcttctgctttgagtgtgtgaagacacgctatgacacccgccagcgcaaatgtcccaagtgtaatgctgcttttggtgccaatgattttcatcgcatctacattggttga

SEQ ID NO: 991 - protein, 555 aa, Homo sapiens [sequence omitted]

SEQ ID NO: 992 - DNA, 32767 bp, Homo sapiens
  source 1..32767: mol_type = genomic DNA
gccagtgccgcgcgtcgagcgggagcagaggaggcgagggaggagggccagagaggcagttggaagatggcggacgaggcggccctcgcccttcagcccggcggctccccctcggcggcgggggccgacagggaggccgcgtcgtcccccgccggggagccgctccgcaagaggccgcggagagatggtcccggcctcgagcggagcccgggcgagcccggtggggcggccccagagcgtgaggtgccggcggcggccaggggctgcccgggtgcggcggcggcggcgctgtggcgggaggcggaggcagaggcggcggcggcaggcggggagcaagaggcccaggcgactgcggcggctggggaaggagacaatgggccgggcctgcagggcccatctcgggagccaccgctggccgacaacttgtacgacgaagacgacgacgacgagggcgaggaggaggaagaggcggcggcggcggcgattgggtaccgaggtgcgcagggtgcgggcggccggaactgcgcatctcctcctccctctccccgggctcctactggcctgaggttgagggcggctgggggctcggggcaggctccgcggcgttcccctccccaccccggccctccgttcagccgcgctcctccggggctgcggttcctactgcgcgagctgccagtggattcgctcttttcctccgtccgtggcccgcctgggcggccttgttctttccgcagcagccaggtcgggagactctcgcagtcgctttaaaataagtttctctccccctcttactcttttagcatattgcttttgttagagctttttttttctttttctttattttttattttcattgcttttctcctctaccccccagcacacttaagtctgcaactttttggctgtcccgttggtctgcgttttcaattgctttttgcaaacttgacacctgtgcagtttgctttttttggtctatatttttatgactgaaattacaatttttgaaagaggaaagctgtttctatagtcacagcttgcaaaatttaaagaacgtggctgttcctgaagacattaccattctgtaatgcagttaggagtgggtatgggagagagagtacttttagagctgttcatattacttttattctaatcttgctcttgtgcggtaatggtgtttgggctaaacatgctttttttgtatgtatgtagtattgagacacaaacttaacacttctagcataatgaagcagatatgttgcagttgtcatgttcttgaaggtttctttttttttttttttttttttttgagacggagtctcgctctgtcgctaggctggagtgcagtggcgcgatctcggctcagtgcaacctccgcctcccgcgttcaaccgattctccttcagcctgccgagtagctgggactacagacacccgccaccacgcccagctaatttttgtgtttttagcagagacggggtttcaccatgttggccaggatggtcttgatttcttgacttcgtgatccgtccgcctcggccgcccaaagtgctgggattacaggcgtgagccaccgcgcccggtcaggtttcttatttttgatctgaggagtttctatccttgataggtgttcatctttatcaatatttgggtcaggccgggcgcggtggctctttcgtgtaatcctagcactttgggaggccaaagcgggaggatctcttgagcctaggagtttcaggccagcctgggcaacatagcgagacctcctctctactaaaagtaaaaaaagcgggacgtggtgtcgcacacctttagtcccaggtactagagttcgaggttgcagtgagctgtgatcctgccactgcactccagggtgggcaacagagtgagaccccgtctcaaaaaaaaaaaaaaaaaaaagtaatatgtgtttttagggactgatttagtaaagagaccctgatttcaagcaacacagttgagtactaatttattatttacctaataataattgtgttattaatactgtttatttaatagaggaaacaatgcagaggtacttgtagtattgtgtaagtttaacgtgcgcattgccaaggttatatttgaatgacgtttttatgtaaatgtccatttattacacgtttcacgaacgctattgtttgtgattgtatgatacattctagctagattattatcttttctttttttttttccttttctttttttttaaaaggtggagtttcgctcttgttacccaagctggagtgcaatggcgtgatctcggctcaccgcaacctccgcttcccgggttcaagccattctcgtgcctcagcctcctgagtagttgggattacaggcatgcgccaccatgcccggctaatttttgtattattagtagagacgagatttctccatgttggtcaggctggtctcgaattctcaacctcaggtgatccgcctgcctcggcctcccaaagctctggaattagaggcgtgagccaccgctcccggctatcttttctgttttttaagtagacttaatttatttttagattttggctgaaactgagtgagcagaattcctaaagatgaagaaactgttccaatgaacagtgcaagctgaccccataggcatgctttacacacgccgtgtaaatgttaaatgctgtactcgatgaaaatgattgctctataaccgttcatacattttaggtgcatgttgttttgatagccttgactgacttggtttcttttgcagataaccttctgttcggtgatgaaattatcactaatggttttcattcctgtgaaagtgatgaggaggatagagcctcacatgcaagctctagtgactggactccaaggccacggataggtatggctcagagctgttaattttagagagtaaatgtacggtttttggtttgtttgttttgagacagagtttcgctcttgttgcggaggctggagtgcaatggcgcgatctcggctcaccgtaccctccgccttccaggttcaagcgattctcctgcctcagcctccccagcagctgggattacatgcatatgccactacgcccggctaattttgaatttttagtagagacggggtttctccatgttggtcaggctggtcttgaactcccgacctcaggtgatccgtccgcctgggcctcccaaagtgctgggattacaggcatgtgccaccttgccccacctcacttgtcccctttttgtgtagtgttcttcatccggttagaatatcttcctccctcacttcatattccttgttttttcactttattgtacacttaccacttcttgaaaagctctgtatcttactttttaaattgtgttgtttcctggtctagaatataagttctacgggagcaggaatttttgactgacttgtatactcctgtcttttcagtgcctaaaaaagtgcctggcacatagtttgtgctcaataaatatttaataaatatgtgaatgaaatgggaaagtatttcgatgtagaaagcattatcagttttttataccaaaggtataaccatcttgaaagtggatctttttgtgttctcactcttacaaatggcttgattatttaaacatagtgaagatcagtttctctttggtgtctgtaatttatttatttatttatttttgttttctcaagcctagggagctggtttgagcaatctcagggtaaaagaaaatgattagttctcagaacatcaacattgtatgtattatcttggaagatgggttaagatcaaattgaaaaattaccggaaaaaaattaagatggcagttatgtatagattttcatttctttttcctgtgtggttttaatgataagtagtacaggcttttaggactggtacgatttttctatgtcgtagaacccttttgtaaatacttttggtattatggtgtgtgtttctagatattaaccataagaacttaattctggttgttaattaattagactcttgaaatatatacttacagctgaagggggtcttcccaactcttcattagatcttcctaatctcattgggatatagcattaattctgagtgtaccgagaatgaaataccattaaattgcattttcttactttgcaaaaaaccctcacagaatgctaactcattacttcagaaaataaatgagattttgaattacttgataagttgactttaagccttttcccccttattgtaggtccatatacttttgttcagcaacatcttatgattggcacagatcctcgaacaattcttaaagatttattgccggaaacaatacctccacctgagttggatgatatgacactgtggcagattgttattaatatcctttcagaaccaccaaaaaggaaaaaaagaaaagatattaatacaattgaagatgctgtgaaattactgcaagagtgcaaaaaaattatagttctaactggagctggggtatgtaagactagtacatggggaggtcgtatatgtattttcttatgccttttccaagtaggaaacatttttctggtttagaaggatttatccttacatgataatggatgtttgggaactgccaaaaactgagtgcagcagcagttgctaaattagttcagatttttaaaacctctccagccttaaaaaaatatttgcttctgcttatttatagcacagtgggtaaatggagttaaggcaagatttctacctacattatatcatagctcctaaaggagatgcagggaattgaaactctgcttttgttaagggatgtcagtctgatggagaaattgggtatttgttagatctttatgagaaactggaaacctaattggtattcacaagtgaaaagcttagtgttgggaagagtaacagattcctaccttccctccatattaattaagatgatgtgattgtggcgacttgacattttctatttgatctaccttagggttgcagctaattagttacctaagactattgcatagtgtgtgttttatacagagtatattacatgttagcaaccagagcaactgctgtagtaaaattttgtcctgttttctgccatttcgagttgcgaaagggtgttacataatcttagatgatcatcaggagtatgttttgctcacagataacgatgtagacaagtttgtttaacttaaattgaccttgactccaggtcaaattggagtcaactctggtaagatgatgaaacaataacttctgaaatctctatttgaaatgtcaggatttttttgtacgattagtgggcacgtctcaaagaaatgaagaattgaaatattatacaccttttttttttttcttttttttggatacagggtcttgctgtgttgccctggctggagtgcagtggtgtcatcatggctcactgcagtctcagcctctcctggcctgagtcttgctctgttgcctaggctggagtgcagtggcaggatcttggctcactgcaacctctgcctcctgggttcaagcaattctcttgcctcagcctcctgagtagctgggattacaggcgcacaccaccacacctggctaatttttgtatttttagtagagatggggtttcaccatattggccaggctggtctgaaactcctgaccttgtgatccgcctgccttggcctcccaaagtgccaggattacaggcgtgatccaccgtgcctggctatacattgttttttttaatgaaaatagagaattgttgtagtattgaggtaatagaatcctaactaaaggagcaatttctttggaattacttctctgtaatagaaattcttggctggtggagtggctcatgcatgtaattccagcactttgggaggctaaagtgggaggatcacttgagccctggagtttgagatcaccctgagcaacatagaccctgactctacaaaaaattagcctggtgtgctggtgcgtacttgtagtcccagctgctaaggaggttgaggtgggaggattgcttgagccggaaaggttaaggccataatgagccatgatggcaccactgcactccagcctgggcgtcagagcgaaactgtctaaaaagaaaaaaaacaaaaagccgggcgcggtggctcacacctgtaatcccagcactttgggaggctgaggcctgcggatcacgaggttaggagatcgagaccatcttggctaacatggtgacaccccgtctctactaaaaatacaaaaaatcagccggtcgcggtggcaggcacctgcattcccagctaatcagtaggctaaggcaggagaatggtgtgaacccaggaggcggagcttacagtgagccgagatcgcaccactgcactccagactgggcgacagtgtgagactctgtctcaaaaaaaaaaaaaacaaaaaaaaaaagaaaaaattcttccctacttaaaataatttgttgaaatggtttattttcttctcaagttgcatttgctttaatttgttggctaaatgcttaaaaggcttaaaattggcctgacttaaaaattccttatctgtgttaaagatggaatatgaggtatgtttaattttactcagttatttgggagttttatttctgaaataagggtagggttgtatttttatttcttaaaagaagtttcagactaaaattttctttctcaactcttacctaattatatggtaagagagctagctagttcctataaaggtagaagatttaattttacaaattatgccatgcacattttaggtgtctgtttcatgtggaatacctgacttcaggtcaagggatggtatttatgctcgccttgctgtagacttcccagatcttccagatcctcaagcgatgtttgatattgaatatttcagaaaagatccaagaccattcttcaagtttgcaaaggtactatgaactcttctggttgtttctttggccttctctcatgaaaaagtattttgttcacatacagccaccttaaggttatcgttcattgtttagtaaagtgaatgctgctactgtggcggagtaagatcactcattatggctagaattcctttattcctagaggaggactattatctacttcattttaggagtgagcttattttcaaagagatagttcatatttttaaaatttgcactgcagcgatggtcgttattctgcctgggcttttttaagaggtttgcacaccatataaaagtaacataacttgtgatttttaatattttattagagattgtaaaggttataacatcactttggtgtttcgtagtcaagttttaacataaggatgtgcctgaaaaatcatttgtaattagagaatgggaagattcttgggttgcatttttgtcagcaaattgcagaggatcattattctgctctagagttgcaccgtccagttcagaagccactagccacatgtggctgttgagtacttgaaatgtattgatatgtgcaataagtgtagaagacatattggattttagagatccagtatggaaaatacaaagtatttcattagttttattcatcaaatattaaacaaatattggtttttatatggaaaaaatacttaaaattaattttgaattcttttgaaatacttttgatattgggttaaataaaatgtattttgggctgtgcgtgttgcctcatgcctgtaatttcagcactttgggaggccaaggtgggaggatcagttgagcccaggagtttgagaccagcctgagcaacataatgagactccatctctacaaaataaataataaaatttgctgagcatggtggtgtgcacctgtagacccatccactcagtagtctgaggtgggaagatcccttgagctcaggagctcaagactgagtgaaccatgatctgccattgcactccaccctgggcaacagagcaagagtgtttccaaaatatatgtatgttttttgaagtttactttttttttttttctttttttgagaagtagtcttcctttgtcccccaggctggagtgcaatggcatgatcttggctcatagcaacctctgcctcccaggttcaagtgattctcctgcctcagcatcctgagtagctgggattacaggcgcccgctaccatgcccagctaatttctgtatttttagtagagacagggtttcaccaggttggccaggctggtgttgaactcctgacttcaggtgatccaccctcctcggcctcccaaggctctgggattataggcgtgagccaccgcgcctggccagttttcaccttaatgtggttactaaacaatttaaagttatatgtatgtctcacattatgtacctattgtacagctctgctttagcatagaaagtttaataatgcattacaccattctcaagagattgagtcattagaaaactgttttctttcctgtatttcagtcttttggaaagaaattacaaaatttgttattgttaaacttggaggtatatatatttgaaagagtcattttattttattttactttaagtgccgggatacatgtgcagaatgcgcagatttgttaacataggtatacatgtgccatggtggtttgctgcatctatcaacctgtcatctaggttgtaagccccacattcattaggtatttgtcctaatgcttttccaccccttgccccccacctcctgacaggcctctgtgtgtggtgttccccaccctgtgtccatgtgttcttattgttcaactctcacttatgagtgaggacatgtggtgtttggttttctgttcttgtgttagtttgctgaggatgatggcttccagcgaaggagtcttgtattagtggctttttccccacctaatcgttagaagttgtgaatagggacttctttaatgaatccagaagttaatgaacctagcttttttttttttttttttggagacggagtctggctctgtttcccaggctggagtgtagtggtgtgatctctgctcaccatacaacctccacttcccgagttcaagagattctcctgcctcagccttccgagttgttgggactacaggcgcgtgctgccatgcctggctaatttttgtatttttggtagagacggggattcactatgttggccaggttggtcttgaactcctgaccttgtggtccgcccatctcagcctcccaaagtgctgggattacaggtgcgaggcaccgcgccccgcgccctgccgatgaacctaaattttaactaaacagtggccttatctactttcagaccatgtggtatatttacatgactacaggagaagctttgctaattcagaataaattatgttacttaaattggcgactgtctttaaaaaaaaagtgattttttggatgcagtagctcgtgcctataatcccagtgctttgggaagctgagataggaagatctcttgaactccggagtttgagaccagcctgcgcaacacagtgagaccctaatcactacacccctccaccccatgtaacttttgttttatccaggttgtggtatattaaatgggcattagtgtaaagtgggaaaattatattaattcttgaatatgattactaaactgaatttgaaaagttttcaggctatcaagagaatttttaacttaaaacttatataatttgaactttttacttcatatatccgtaatgatgatggtcatctatatctagcttttagagcagacaactggttcatacctggattaaataaataatgtaaagttattttttgttaattatggattagtgaagatttactgttttaacctactcctgctagtggcactactgcatggttttgaagaccagtgaagtatgacttaaaggtttcttgaattggagctaggacactggcatttataaaatctccacgtagcgcagacattgacactatcagaagaccagcaagtaactagaagttactttgatcttaaatcaactacaaaaaacttgactcactagttatggagaatacattttttattgttaaactgaaaaaaaattcagtcacttataaggtgtagcctcttctaatcctgtttatataaatttatttattattattattttttgagatggagtcttgctctgttgccaggctgtagtgcattggcgcgatctcggctcactgcatcctccacctcccgggttcaagcaattctcttgcctcagcctcccaagtagctgggactacaggcacgtgccatcacgatcagcacttttagtagagacggggtttcaccatgttggcaaggacgtgtctcgtcgtgacctcgtgatccgcccgtttcagcctcccaaagtgttgggattacaggtgtgagccacaatgtccagctgataaatttaattttgcttttctgagttttcatttatggtaatggttaaatcagctaggctttacagttgttactcacatataattctttgtccatcctttaattctcacattgggaactgactaaaaaaagaaagcttccagtctgggcacagtggctcacacctgtaatcccagcactttgggaggccgaggtgggtggatcacctgaggtcaggagttcaagaccagcctggccaacacagcaataccccgtctctaataaaaaatacaaaaatcagccaggcttgggtggcgggcgcctgtcgtcccagctacgcaggaggctgagacggggagaattgcttgaagccaggaggtggaggttgcagtgagccgaaagcgcttaaggagaaataagtaaggacaaagagtgcaggatagtatcctgacacggaggatggggagggtatgtaaatattgtcgatattttactgaatttctaaatattacaagaatagaatattcataggataacctaagcttttctgtgagtcagtgtactaggcagaaagttcactaaagtggtttatgatttttgctacttatgagaaaacattaaaaatgaagccatgaaaaggaaatattggtgaaatttagatacttcagaaggaaagagagactttcttttttttttggaaagaatttctataccatctattatatcattgattgtatgtgattattgagaattaacttgttttttttttttttgttttttttttttgagacagttttgctcttgtcacccaggctggagtgccgtggtgagatctcggctcactacaaccttcacctcccgagttcaagcaattctgctgcctcagtctactgagtagctgggattacaggtgcccatcaccacgcccagctaatttttctaattttagtagagacgggatttcaccatgttggtcaggctggtctcgaactcctgacctcaggtgatccgcccgcctaggccaaagtgctgggattacaggcgtgagtctcccacgcccagcccttaaatttcatttagactggaaatttcaagtaatggagaggtgtgttaaggaagttattgctctgttagagcagtttcttaaatttggcactattgacattttgggctggatttttctttttgtttctgagatagtttcactctgtcgagccatcacagctcgttgcagccttgaactcctgggctccttgaacaggaggctcctgcctgagcctcctgagtagctgagaccataggcacgtaccatatacctagctaaatgtgtttttgactttcttttttctttgtagagtcaagttctcactatgttgtccaggctggtcttgaaatcctgggttccagcaattctcctgcttagccttacagagtgtcgggattgtaggcataggccactgcacccggccttgggctgatatttatttgctatggggaactttcctgtgcgttgtaggatgtttggcaatgtccctggccggccaggtgcagcggctcacacctgtaatcccagcactttgggaggctgaggtgggcggatcacttgaggctgggagttcagaagagaccagccaacatggtgaaaccctgtctctactaaaaatacaaaaattagccgggtgtggtgacacacatgagaatcacttgaactcaggaggctgagtttgccgtgagctgagatcgcgctgctgtactccagcctgggtgacaaagcaagaatctgtctcaaaaaaaaaaaaaaaaaaaaaaaaaattcgctggtctccacctacgtttgtatccccaccccaagtcctgacaataaaaaatgtcttcaaaatgttccttgcaaaattgctcattgaggctaactgaggtggctcacaactttaatcccagccctttggaaggctgaggctggcagatcacttaagcccaggtgactggccctggccaacttggcaaaaccctgtctctactaagaatacaaaaaatagccagacgtggtggtgcacacctgtaattccagctactcgggaggctgaggcagcagaatcacttgaacctgggaggcggaggttgcagtgagccgagatcgcaccactctactccagcctgattgacagagtgagactccatctcaaaaaaaaaagaaattactctctgagcaccagtgtgttacagtgtgcttagctgtggtaccactttggattctttcacacaagaacagttaaggccagttttaaagctgtggggccatttctgaactgtattttgtttttttttttttggagatgaagtttcactcttgttgctcaggctggagtgcgatggtgtgatctcggctcacttgcaacctccgcctcccaggttcaagcaatctcctgccttagcctcttgagtagacttgattatgggatcttggctcactgcaacctctgcttcccaggttcaaacagttctgccttagcctgctgagtagctgggattacaggtgcccgccaccatgcttggctaattttgtatttttagtagagacggggtttcaccatattggccaggctggtctcgaactcttgaccttgtgattcacccacctctgcctcccaaagtgctggtattacaggcatgagccactgtgcctagccaattttttgaatttttagtagagatggggtttcatcatgttggccacgctggtctcgaactcctgacctcaggtgatccacccaccttggcctcctaaagttctgggattacaggcgtgagccacttcgcccagcctgcactgtgttcttatcctgcataatgacttaaattgataataagttgtggtcatggttctcagaaacctaaaataattcactgatgttaataaaaatgagtggttgtatttagagtcaaggcgaaactgaattaggatgtataaaataactttttttttttttttttttttttaagtaggactgttgttcggctgggcgtggtggctcacgcctgtaatcccagcactttgggaggccacagcgggcggtcaaaagtttgagaccagcctgaccaacatggtgaaaccctgtctctactaaaaatacaaaaattagatggatgtggtggcgcatgctgtaatcccagctactcaggaggctgaagcaggagaatcacttgaacccaggaggcggaggttgcagtgagctgagatggcaccactgcactccagcctgggcgagagagtgagactctgtctcaaaaaaaaaaaaaaagaaaagaaaaaaaaagaaaagggactatactatgttcgaagagtgtagtttctgtcccatactgaattcactgttctttccctagtgattaaaatacaagaaaaggtagagggagaaacacgaactgaattttatgaacttaattccaagaatgtatttttacatttgttcaaaaaattattactttattgataatatgcaaacataccagattatgtattaatagttaaaaatttgagttctagaacaagcttattaaaaatcaacgtcagtaaaaagaaaatagatggtagtcacagtgccattcatctgaaaataatgttttaatactcaacatgtatatggattatatatctatacgtttatagtattgtagctggatttatgttacatttttagcataaaatttggcttttgctgggcccagtggcttgcgactgtagtcccagcaactcaggagggtaaggtgggaggattgcttgaaccaaagagtttgaggctgcagtgagctgtgacctcacctctgcacaccagcctgagtgacagagcaagacccatccctgaaaagaaaaaacttggctgttttactttgctttcaatttgtagtatattctacttaatataataaacttactttctgtgaggtgcttgaatactttttaatggttatttatgaagtggtgaactgtaattctgtatttgtacatttggatgtacaaatagtgttgctacagttgtccttttttggtatgtctccagtgttcttaggataaattcctgaaagtgaatttcagttttgaatttcagagaaacatgtcaaagttcttctttaagcctttaagtctcctgatatgttttgtcgtattgcagcttggaaaggttgaaataaaatcctctattagggctgggtgcagtggctcatgcctgtaatccgagcactttgggatttagctgatttggctgatttatcatgccactgccacctgtatccacccaaaatccacaaaaaccccaggatacattcttagcattaaaaaaaaagttatataaatatatataattatatatatatttgagacagggcctgtctctgatacccagacgtgtgcagtatctttcaaaaatcatatatctatatatagtttgccccttccttcagtctttgctgcccctaatatctgtccttaatggttaccatggtgaaactcttggaaatcattcagggggaaaaaaaatttgtgttgggataggggagggatgtcagcataagtttttaatacttgataaatgattgccaacagaatcaaaaacaccttgttttctatcttttttcaccatataatattcttgagaataatttcgtaacagcacttaacagatataccttatttttcaaagaaggctgtgtagcattctattttaaagttgtttcacagtatatgagtctcctattgataggtatctgcatttttgtctttttgatctagggttgtttttaaggcagtttaaaaactatagtaagtaaaagaggccaggtgcggtggctcacacctgtaaacccagcactttgggaggccgaggcgggtggatcacttgaggtaggagtttgagaccagcctggcaaacatggtgaaacccttctctactaaaaatacaaaaaattagccggccgtggtggcaagcgcctgtagtcccagctgttcggaaggctgagggaggagaatcgcttgaactcgggaggcggagattgcagtgagccaataatatgctgctgtactccagcctgggcaacagagcgagactctatctcaaaaataaatacaattttaaataaaattataaaaataaagcagcacccagctttattttttatttatttatttattttttgagacagagtcgcattctgtcgctcaagttggagtgcagtggtgccatcttggctcactgcaacctctgcctcccgggttcaagtgattctcccgcttcagcctcccaggtagctgagattacaggtgtgtgccaccacgcccagctaatttgtatttttagtagagatgggggtttcaccatgtttgccaggctggtcttgaactcctaacctcaggtgatccgcccaccttggcctcccaaagtgctgggtttataggtgtgagccgccgcgcttggctcaacatcttattgtttgagacggggtctccttctgttatccaagctggagtgtagtagtgtgatcttacagctcactgcagcctccaactcttgggctcaaatgattctcctgtctcagcctcccaagtagctagtactacaggtgtgcaccaccatgccctgctgtttctttgttttttttatatggacagtcttgctatgttgcccaggctggtctcaaactcctgagctcgagtgattctgctgcctcagctactcaaagtgctgggattgtaggcgttaactatcaggttaggcctgttctgtttttattagcgtggatgactgctggttactactggccgtttgtatatccttgaattacctctttgtttttagccatttttctccatttgggtgctttttcacagtgacttctgggaatattatgttcttttcttttgatttacctttcaaattttatttttatggatatataatagttgtacgtgtacattatatattcttgaagagttaggcttattgggattccagcctttagtagtcccatgaaggtgagcaaactgaaatgtacttactagtcttagtcatttggttcgtaatatgtaatagaaatggtgcttatcctaaaagaaaaatagaaaacttgagggtgaaggatcagaaattgaagacagtaaatactgcatagaggtttaaatgctagggtttttaggttttcttttttttttgagatagtcttgctctgacacccaggctggactgcaacctctgttccctggcctcaagcgatcctcccaccttagcctcctgactagctgtgaccacagatgtgcaccaccatgcccggctatttttttttgtatttttggtagagatggggtctcgccatgttgcccagtccagtgctggattttcatatcaaaacagggctctgctacttacttgctcttgtgaccaaaatggcaagttaggtttgttttgtatttgttttcatctgcatcggggtatatgttcacagctggatcagcaaactttctgtagtaaggtagggcctggtagtaaatatgtagtatgctttgcagactgcatagggtctctgtcatatgttctttgttttctttacagccttgaacaaattaaaaaacccagtcttcagccttgtctgtagcataataaagaggaaattaaaagtgcttatgttatacgtggtacatactaaaatttattaagtggcgactggcagtttaactaattgacattctcttgtgttaggttaatacaggggttggcgtactatggcctcagtccaaatgtggcccactccatgtttttgtataggctgtgagctaagcattaagcattaatttattacttaaatcaacaaataaagtttatgtggtgtacaacatgatgttttgatgtgtgtacattatggaatggctaactcaagctaatattcattacttcacatacttttttttggtggtgagaacatttaaaatgtactcttaataattttcaggtatacaatatttgtttttgtttttgtttttgttttgagacgaagtctcgctcttgtccccaggctggagtgcagtggcgctatcttggctcactgcaacctccgcctcccaggtacaagcgattctcctgcctcagcctcccaagtagctgggattacaggcgcctgtctccacgcccggctagttattgtatttttagtaaagacagggtttcaccatgttggccaggctggtctcaaactcctgacctcaggtgatccgcctgcctcagcctcccaaagtgctgggattacaggcgtgagccaccgcgcccggctacaatatgttcttaattatagtcagcaatagatctcctgaacttattcttcccagcgtcttcccaatcccacctccaccccctgctaataattaattttaaatgactggggaaaaaattgaaagaactgtttcatgacacttgaacattatataaaattttcatgtcagtgttcataaatacaaacttttattagaacatagccatactatttatatattgaaatacagttgaatttgtcatatgaccaatttattagtattgattaagatgttgagcagtttattcaagtgtggttttgtggaatgaaagagacaggagggattatgaggactctccttagcaggattgatgcatttcactttttttgacaggaaggaaagtttaggttctattttctcagcaactctacttaactgcctccatctgaactatatataggagggggtggatatcagcaaagattaacatcagtaaattttgatgaattctctaaaaattctgatttttaaagagggaattttggctgggcacagtggctcacacctgtaatcctaagcactttgggaggccaaggcaggtggatcacctgaggtctggagtttgagaccagcctggccaacatggtgaaaccctgtctctactaaaaacaaattagctgaatgtggtggcgcgcacctgtagtcccagctccttgggaggctgaggtgggagaattgcctaaacccaggagaggtggaggttgcagtgagccgagattgtgccattgcactccatcctgggtgacagagcgagactctcaaaaaaaaaggtgggtgtgaattttgttatgttgtgcgggctggagtgtagtgcccatccattggcacgatcatagagtactacagctccctaactcccagactcaagtgattctccctcctctgtctccccagtagcaggaactacaggcctgtgccaccatgcccagctttcttagtcttgagggactgcatttacacctatgccttttactctagggtcttttattcatattgctagaaatttggagaagaaagaaaggcataatctctgcagaaaagccattatttctgcagatagttctttttttttttgagatggagtctttctttgtcacccaggctggagtgcagtggtgtgatctaggctcactacaagctccacctcctgggttcacgccattctcctgccttagcctcccgagtagtgggactacaggcacccgccaccatgcccagctaatttttttttgtattttttagtagagacggggtttcaccatcttagccaggatggtctcgatcttctgaccttgtgatccgccgacctcggccacccaaagtgctgggattacaggcatgagccaccacatccggccaatttctgcggatagttctaagctttagttttgaccacgttggttgcctatggccaattcctggattatttgcatgtttccagacacagctatgtgaaagcagggtttgttttaatagtgttttgagcctttgattccagttctgcttccactcttggtctataaggatccctatggcagcaacagaatggcccagccctcatgattggttgcttaaaaaggctttaggatattcaaactgggtggcctgtcttgtttggaataggactaagcatgtcacactttcaccatggaagagttaatccatattctatctgtaagttgtatctccagtcattggttttcaacaagtggtcctatcttaggaggagtggtatattagaacagtccttccagagtaatttttttcattatttcagattttttagttttttttgtttgttttttttttttttttttttaaaggctctcactctgtcacccaggctggagagcagtgatacgatcatagctcactggaacctctacctccctgggctcaggtgatcctcccacctcagccttctgagtttctgggactacaggcatgaaccgtgaggcccagctaatttttgtgatttttgtgttttttgtagagtcagggtttctccatgttgcccaggctggtctcgtactcctggtctcaagtaacctgcccgcctcggccttccaaagtgctgggattagaggtgtgagccaccacacctgtactactacttttagtttgaacactatatttaaatctaataattcagacatggcccatttcatacttgacagaaagtatgagtcaaagactcaaatcattcagattctcacatatgtaaaacgtacgcttggccgggtgcagtggctcacgcctgtaatcccagcactttgtgagaccaaggtgggcggatcacctgaggtcaggagttcaagaccagcctgaccaacatggagaaaccccgtctctactaaaaatacaaaattagctggggtggtggcacatgcctgtaatcccagctattcaggaagctgaggcaggagaatcacttgaacccgggaggtggaggttgtggtgagctgagatcgcgccattgcactccagcctgggcaaaaagagcgaaactctgtctcaaaaaaaaaaaaaaaagcaggcttataaaataaaacaaaaatgtcccttatgatttgtcttaaaggtagttgaattaataagagctaaatctagtgtcccatacatctttgtgtttcttactctaccctttagaaagggtgggggtggacgtggataaggcacacagttaattcagggacggtggagtcttggtacttgctctttttccctgaccttgctttggagttattttattttttaaattctgcatttggcatgctattatcacttgcttactattataggtcctattttatctgttgcctagcatattctcatagtgcctaaaatactctaaaagctatttccagagggagctttaatgagacatacaatgcttaatctctcaaatgtaaatgtactagaacaaagcattctggggaagaaaacagtggttgatttaactgaactcacttttccaaaacagtggcttttgattttctgtaaacattgactttattaagcttttcccttgctactatatgcactctctatttcttaaattgcaaagagttattcatgaaatttgtgataaatatttgaatctaaggcaacgtttttggattctttatacgaggtttttagcagcatgtgtacatgtatgtgatagctgttaacggaattcacttaagttttacttagaagcctgggtagtagaacctagaagttgcagtgggaatttttttttaatttgaaagattaaataggtaaaaagtcatctttaatctctattaaacttttttgtataatgtcagaagtgaaagttccccacatctgcttacagcctgtttgtatccttcctgacttgattgattaaatggacatctctatatacatatgcatataatttcaatttttgcttagtaacaaaaacaaaagttacacatactggtgactaatttgcttttttcacgtatgtcatgaaccattttccagggcagttcatctagatctccctcaattctttttaatggctacatattccactattatggatgtaccatatttatacaaccggttccctattgatggacatatggttgtgtctagttttttgctagcattgtgatagattagagcctgtaatgaatggtaaggaagtaagtagatgatagcactactactttgaaggaaaaagtagagaataaacttcctttgccatagtcacttactaaatggaatttaataaaaacactgtcaaaagttgggaggaccaaaattgatactttttctctgatctttttgccatgtgtatatctgaattctttgtttttaaagaagaaacagcattgaagcattatttggggggaaaaacacacacacaaaatccagcaactcagcattcatgagcaactctatactataccagtatgtgcctgtgcagtggaaggaaaacaattttggtaaggattaaaactttagctttaaacttccagcaggttgatattctaatgaatgataaatcaaaaaaaaattttaaatattcttgtattgacagtgcttttttttttaaatcaccctaccttgatatctgtaattttagtttaaactttcccatttttctttaaagaaaaaaatctgaatttgcagccaacaaaaattagatatcctaaggttgtattacttctgacttttattaaaatatcaacatttcttagagatgtttatgggccgactttgtctttttcttcaaggggccaagttcactaattgctgagttttatgcatatgacagcaaccgtccttttgtaggtgtgtgtcgcatccatctagatactttaaaatgctcatctatttcatttttaaaattatgtgtgtgggattatcagtatttttttgttaaacatatgacatctgtagtttatttcactaatgtaaattttttctaccatttgcttgatacaggaaatatatcctggacaattccagccatctctctgtcacaaattcatagccttgtcagataaggaaggaaaactacttcgcaactatacccagaacatagacacgctggaacaggttgcgggaatccaaaggataattcagtgtcatggttagtaaacttcagagtggttttctgtaatttattttagttttataggaagatatttcctataaagctgactgccatcgagaagtggagataaagcattatttaatcatgttatctcatttatcgataacctcagaaaagtagaaaacaaaaataataaaaacagaagtattggccttgacagttaattatagaaaacctcagatattaatttgcttttgatttcaaaagatgctgcagttgcatgcattcaattattttaaataatcttttctggctgagtgcagtggctcacgcctgtaatcctagcactttgggaagccgaggcgggcagatcccatgaagccaagagttcgagaacagcttggccaacatggtgaaatcccaactctactagaaatactaaaattagccgggcatggtggcaggcgcctgtaatcccagctactcaggaggctgaggcacgagaatcacttgaacctgggagttggaggttgcagcgagccaagattgcaccattgcgctccagcctgggagacagtgagactctgtcaaaaaaaaaaaaaaaaaagaaaaagaaattctgaatacaagagtagtattagctgttaatgaagaaatgtgacatctttagtttatgaaactaaaagaactggatagttgagatgtacaggattcagagattcagaaatgtttaaaacaagtatcaacaggccattaggtatctaaagtgtttctaagaactgccgagctaaggtaatagagttggaactgtccaactctgcaggattttagccctggaggagtgagctgttacagttttgttgaaaagagtagctttagaaggcatcattatattagtgtctcagagattgagaatcatattcattctatgtataaatatataaattcttcatcccctagattctcctgtagtatatcacaaaatctgcagtgtgttctgaggtttaaaatcaaagttaaaaacaaaaacaaaaatccttaaaccctcttaacatttgtgatgttaaactttataacgtttgtggtgtgttcaagaaacagaaatacttctttaataaagcatatatatgttgtttgtttttaggttcctttgcaacagcatcttgcctgatttgtaaatacaaagttgactgtgaagctgtacgaggagatatttttaatcaggtaatttgttgcccatattttaggaattgttcatgtctctgaagtatttcttcttttgcctcaaaatccttttttacccctttaaagtatatatggtacagaaagattcaggaagaaaatagttagcatttgggaattttggtaaaatacacgagaacctttcaataccttatatagaaaacagccctataaaggctcttcaaattatgaaattggcttcttagtatctaagccgaacataaaatgtcagatcataagcaagttgttgttgtagtagtttttctccttcctctccctttttgtgcctgtcagatttggaccttaaattagttatggtaatctaaaattatttcatacatgttcattgccaaaaaatataggaaaatttggcagaaaataaaaattatccagaaatatgtcctgtgtgcttagcaatatatggaggtaatcatgtcattacgaaagaggaagaatagtatattaaaatggagtcattggtcgggtgcagtggctcatgcttgtaatcccagcactttgggaggacgaggtgggtcgatcatttgaggtcagaagtgagaccagcctggccaacatggcaaaaccccgtctctcttaaaaatacaaaaattagcctggcatggtggcatatgcctttaatctcagctgcttgggaggctgaggcaggagaattatttgaactcgggaggtggaggttgtagtgagctgagatcatgccacttcactccaggctgggcaacagaacaagactccatctcaaataaataaaatggaatcattttatttgacaaatgtctatttttttttgaaaggatcaattcccatttagtgtatatacacacattatgtttttcctcttaatatatgatggactcttcaatgtcaagtgtttttctacatagatattataacaagagcatagtatttcattgtttcatagtatgttaataaactacccatcattgacagttgctgtttatccatagcttttctgttttgttttttttttaataattctgaaatgtattcttagaggtatggaaatgttgactatttctaacttgggcttactctttgcttctctacctcaaccaaaatctgaaaatatgtaggtagttcctcgatgtcctaggtgcccagctgatgaaccgcttgctatcatgaaaccagagattgtgttttttggtgaaaatttaccagaacagtttcatagagccatgaagtatgacaaagatgaagttgacctcctcattgttattgggtcttccctcaaagtaagaccagtagcactaattccaagtaagttggtgatggtttttggagaacatttctatatataatgtcatgggttgtgggtctgtataatagacgctagtaatcttaactctgcttctgtttgaaagagtggtgaagagctaattttagaaattgtttgtttgtttgtttattgagatggagtttccctcttgttgcccaggctggagtgcagtcgcatatcttggctcactgcaacctccgcctcccgggttcaagcgattcttctgcctcagccttctgagtagctgggatcacaggcgtccaccaacatgcctggctagtttttgtatttttagtatagaccgggtttcaccatgttggccaggctggtctcgaactcctcagctcaggtgatccgcctgtctctgccttctaaagtgctgggattacaggcatgagcccccatgcctggccagaaattctttatttttagtagagatgaggtcttgttgtgttgcccaggctggattcgaactcctgggctcaagtgatcctcctgcctcagccccttgagtagctaggattacaggcacgagcctccacatctggctgaactgtttttttaggtggcattgttcattgagactggtgaatctgacattttgatggggggtggagggttgtcaaaacgcaagtaatgttggtggctcgtgcctgtaatctcagcactttgggaggccgaggtaggtggatcgcttgagggcagcagtttgagaccagcctggccaacatggtgaaaccctgtctctactaaaaatacaaaaattagctgggcatagtggtgtgcacatgtagtcccagctacttgggaggttggggcatgagaatcgcttgaactcaggaggcagaggttgcaatgagccgagaatgtgccactgcactccagcctgggtgacagagtgggactctgtctcaaaaaatcaaaaacaaacccagaagtaatgctaaactctacttctaatttatgtgaaaaattaagacaaaggtagagttcaacttagactttttggtggaatgtgtttttaatgttgcaagggttagcatcaattaatttatgaaatggtcctttatccttatattttttgattacagttttgatctttcaaatttaattgatttcacatttaataaattcaaatgtatagtttggtagaagtgtaacataccatgtaagatggaatttgggggctcagaatgattggttcattcttgtagtaacagccatgccataacggtgatatgtcgatatagtttacccaaaagggtgtgtatataaaagtgttcacataaaatttaaatccttattactctcaggaaaatttctttgtcatatatattctcatactgtctgtttcctcctctagtttagaatcagaggaggagagagagagatttcagttgcatcagatgtgtcctttcataagtgagggaaagaggagaggaaaaatattaaatccctagccagagaattgaattagaccccacatcagcagtcaaggcagccagagtaaacagttggaagaaacatggagtcaagctcttcaattttgtgtctatcccatatctcgtggctttagcagttaactcagtcttacctaattagctgtgaaattctgttaaagtagaatacaagacaatttgcaattaaatgaaacatgaaaatttaatatacaaatctctttgttcttgagttgctcttcttaaagcaaaatcaaaggcactctgcttaaaagcttttctttttattttttagagacgggtgtcttgctgtagctcaggctagagtgcagtggtgcagtttcagctcactgcagccttcaactcctggggacaagcagtccttccacttcagcttcctgagtagttaggaccagaggcgcacaccatgcttggcaaatttttaaatttttttttgtagaaacgggattcactttgttgcccaggctggtcacaaactcctggcctcaagtgatccttcctcctctgcctctcaaagcattaggattacaggcatgagctaccatgcctggtccttaaaaacttttctttcaaaagctttctgtgggatagtatgatgtgttgcaaagataattaaaaaaagaaacaggtttataatagcgtagaatatgtttatatgactttttccctccccccctcccctccctccctcccttccgtttgtccttccttccattcatccttccttctgttagtccttccttctgtccatccttcccgtccgttcttccttccttccttcgtccatccttctgtctgtccttccttccgttcatctgtccgtccttccttcctcccaccctccctccctccctcctatcctccctccctccctcattgcccaggctggagtgcaatggcatgatctcggctcactgcagtctcccgtgttcaagcagttctcctcccaagtagttgggattagaggcatgcgctaccacacgcccggctaattttgtgtttttagtagagatggggtttcaccatgttggtcgggttggtcttgaactcctgacctcaggtgatccgcctgcctcggcctcccaaagtgctgggattacaggcgtgagccactgtacccagctcaccttctttatatcaggagctacttaagtagaacatttatgtaccaagaactcttctgtgcacttgactaactcatttaatcctcaccacagtcttgtggagaagtactattatcatccccattctgcagacaaggaaatttgaggttcagagtgggaaagtctgggaagattgctcaggggtaaccaggtgataggagcagaacttgagcgttttataaaagacacttaactgcccatctgcttgcttgatgaaatgtaatggcttggttaagtatttagtgcatgggtcttttttgggaatttggagctcaagcccttgttggatttttgcataatgtatctgttgtggttttattagcttacttcctcctccctttttctaactcttatttttcaccctattttaggttccataccccatgaagtgcctcagatattaattaatagagaacctttgcctcatctgcattttgatgtagagcttcttggagactgtgatgtcataattaatgaattgtgtcataggttaggtggtgaatatgccaaactttgctgtaaccctgtaaagctttcagaaattactgaaaaacctccacgaacacaaaaagaattggcttatttgtcagagttgccacccacacctcttcatgtttcagaagactcaagttcaccagaaagaacttcaccaccagattcttcagtgattgtcacacttttagaccaagcagctaagagtaatgatgatttagatgtgtctgaatcaaaaggttgtatggaagaaaaaccacaggaagtacaaacttctaggaatgttgaaagtattgctgaacagatggaaaatccggatttgaagaatgttggttctagtactggggagaaaaatgaaagaacttcagtggctggaacagtgagaaaatgctggcctaatagagtggcaaaggagcagattagtaggcggcttgatggtaagaaaggcagtcggaccattttgaaagtataaatgtcataacagtatttccaaaaaattagctatttcggcaggttaatcgatagggtagctttatgtagttgattctgtttagagaaactgtacagttcgtaatcagaaaggtaaatcttctggtatcttaacatgatatggagaaggaagtgtttaatagtgctctgtatgttgtgtttctctaggggatggaaaaataagaatgggttattagctggcagaaatgatgacagatttgagtgcttactgtaggtcagctgctttacatatgttacctgattttaatctgaggtaggaactattactcttcttcaggtgggaaaactcaggaccatagaggttaaatacctcatgcacagtaactactaagaagtggaagaaccagattaaaatccagtctatttatgcttagagcctgcccccttaactactatgcggtgttgtctcagatgtagaacacatctttgttttctctgaggacttagaaaaaacacgcgtgattcttctccactgaatataggaatagtttctaccctgtttagaacatgcatagtctttatcaataagtgttaactgacatgtgaaatcactttctactctttggaagccgatgttttaagtccaagtagtctgtatggtggaaattcctaacttatgttaaaaaaaagaaaaccactgtaacttagctataacagtcttatataacttagaactttaagtctcattccatttaccatacttggcgaaaactgacaaattttagacaactgtatttgagtattccagtcatttgctgtaaatacattttagttcagttgaataaacctttggcctttttcatattaggcactgtggtaagttatggagacacagtgattaatgttgtgtataattataaatgtgagtgatactcattaatactttggtataggtgctgctgaagaacaaagtactttattattgttttgaacaaaacatcacacaaaaggtagattttttttttttttttttttttttttttttgtgacggagtctcactctgtcgcccaggctggagtgcagtggcacgatctcagctcactgcaacctctgcgtcccaggttcaagagattctcctgcctcagccttctgagtagctgaaattacaggcatgcgccaccttgctcggctgattcttgtatttttagtagagacggggtttcgccatgttggtcaggctggtctcaaactcctgaccccatgatccatccacctcggcctcccaaagtgctggaattacaggcgtgagccacggcgcccagccccaaaaggtagattctacttggagattagattacagaaggctttctaaggagcaaaatatttaacaataagtagggatttaaaaagagcagacgtgttcacaggggaaactagaaaaagcatagagggatgcttacgtttgcaaatcgtggcagaagtcagaaagtagaaaaattgctactgacttagatacacagttgtctctagcgtatacaaagtctacctatgcactaagacttgcactgggaacttttcttgaatgtcattttgacagatgtgtcaaacggacaatctctttgcccaggaaacagagttaacctggaacagtcatttttttttaaatttatttattttttgagacggagttttgctcttgttgtccaggctgaagtacaatggtgtgatctcggttcacggcaacctccgcctcccgggttcaagcgattctcctgcctcactctccagagtagctgtagctgagaccacaggcgcatgccctcatgctcagctattttttttttttttttttttagtttttgtagaaacaaggtcttgccacattgcccaggctgataccaaactcctgggctcaagcagtctgccagccttggcctcccaaagtgctgggattacaggtgtaagccactgtgccctgcctgtggtgtcttgggaaactcatgagtactatgtgtctgttgtaatagagggaaataagtggttttcacagtgatttgtagtggactgtgaaattttagggattcaggtcagagttgtcacacaggttgtagtcagggtgagaactgggtcatgatgcagtatgaaaaagttcgagagccactttggagagaacttgagataggccacctaccagtgtggtaaccaggcttttgagaattcgtctgggatacggtacaataaatactacatctattatgtgtgaagagatgttaagttagggacatactgtgaattcaaggatagaaaacttttccatcagtttttagggatcctactctttcacttaaaccccaaatggccaagctaggattgatttggtgtgctgtagaaagaacttcattggtattcatggattcacattacatcttagaggagttttcaaaagcgtcttagactgtatgtgtatatacacacacattctgaagcagtaggtgggtcttggggcctgagatctcgggtgaatgtaaatttaggttcacaggtgatactgtagattcacagtgtctacagagtacactatgaatttgtggtgactacattattgacaaaatattttaggtttataatcagaaaaaagttaaaatagttaatgaagatgctttaaaagcctgtgtactttagagaagctacttaacacaaattgggtatctaatgtaggctgggctggatacttcattttcatcaaatctttttaaaataattggtgaaataacctttattgaatatggttttctacatttttcacacttccctccttcatagggttgtgaaaatttatttcatattctagatgaggaaattgaggcacagaggtacacttacaaagatacaataaatggcagaactaagatttgaacccaggactaagtgtattgcttgtatttatttaattaattaatttttaagagacagggcctcactctgttgcctaggctggcccttgaactcctgggctcaagcagtccacctgcctcagcctcctgagtagctgggactgcaggcacaccatgcctcccagttgtttttaaacactaatagtagtctttcataaggacacttataataaaggcagagctggaacccacacttcattccagactgctcagactgagttagtgttagaaaactgaaagtaacatttttattactgtatttcaggtaatcagtatctgtttttgccaccaaatcgttacattttccatggcgctgaggtatattcagactctgaagatgacgtcttatcctctagttcttgtggcagtaacagtgatagtgggacatgccagagtccaagtttagaagaacccatggaggatgaaagtgaaattgaagaattctacaatggcttagaagatgagcctgatgttccagagagagctggaggagctggatttgggactgatggagatgatcaagaggcaattaatgaagctatatctgtgaaacaggaagtaacagacatgaactatccatcaaacaaatcatagtgtaataattgtgcaggtacaggaattgttccaccagcattaggaactttagcatgtcaaaatgaatgtttacttgtgaactcgatagagcaaggaaaccagaaaggtgtaatatttataggttggtaaaatagattgtttttcatggataatttttaacttcattatttctgtacttgtacaaactcaacactaacttttttttttttaaaaaaaaaaaggtactaagtatcttcaatcagctgttggtcaagactaactttcttttaaaggttcatttgtatgataaattcatatgtgtatatataattttttttgttttgtctagtgagtttcaacatttttaaagttttcaaaaagccatcggaatgttaaattaatgtaaagggaacagctaatctagaccaaagaatggtattttcacttttctttgtaacattgaatggtttgaagtactcaaaatctgttacgctaaacttttgattctttaacacaattatttttaaacactggcattttccaaaactgtggcagctaactttttaaaatctcaaatgacatgcagtgtgagtagaaggaagtcaacaatatgtggggagagcactcggttgtctttacttttaaaagtaatacttggtgctaagaatttcaggattattgtatttacgttcaaatgaagatggcttttgtacttcctgtggacatgtagcaatgtctatattggctcataaaactaacctgaaaaacaaataaatgctttggaaatgtttcagttgctttagaaacattagtgcctgcctggatccccttagttttgaaatatttgcca

SEQ ID NO: 993 - DNA, 1668 bp, Homo sapiens
  source 1..1668: mol_type = genomic DNA
atgattggcacagatcctcgaacaattcttaaagatttattgccggaaacaatacctccacctgagttggatgatatgacactgtggcagattgttattaatatcctttcagaaccaccaaaaaggaaaaaaagaaaagatattaatacaattgaagatgctgtgaaattactgcaagagtgcaaaaaaattatagttctaactggagctggggtgtctgtttcatgtggaatacctgacttcaggtcaagggatggtatttatgctcgccttgctgtagacttcccagatcttccagatcctcaagcgatgtttgatattgaatatttcagaaaagatccaagaccattcttcaagtttgcaaaggaaatatatcctggacaattccagccatctctctgtcacaaattcatagccttgtcagataaggaaggaaaactacttcgcaactatacccagaacatagacacgctggaacaggttgcgggaatccaaaggataattcagtgtcatggttcctttgcaacagcatcttgcctgatttgtaaatacaaagttgactgtgaagctgtacgaggagctctttttagtcaggtagttcctcgatgtcctaggtgcccagctgatgaaccgcttgctatcatgaaaccagagattgtgttttttggtgaaaatttaccagaacagtttcatagagccatgaagtatgacaaagatgaagttgacctcctcattgttattgggtcttccctcaaagtaagaccagtagcactaattccaagttccataccccatgaagtgcctcagatattaattaatagagaacctttgcctcatctgcattttgatgtagagcttcttggagactgtgatgtcataattaatgaattgtgtcataggttaggtggtgaatatgccaaactttgctgtaaccctgtaaagctttcagaaattactgaaaaacctccacgaacacaaaaagaattggcttatttgtcagagttgccacccacacctcttcatgtttcagaagactcaagttcaccagaaagaacttcaccaccagattcttcagtgattgtcacacttttagaccaagcagctaagagtaatgatgatttagatgtgtctgaatcaaaaggttgtatggaagaaaaaccacaggaagtacaaacttctaggaatgttgaaagtattgctgaacagatggaaaatccggatttgaagaatgttggttctagtactggggagaaaaatgaaagaacttcagtggctggaacagtgagaaaatgctggcctaatagagtggcaaaggagcagattagtaggcggcttgatggtaatcagtatctgtttttgccaccaaatcgttacattttccatggcgctgaggtatattcagactctgaagatgacgtcttatcctctagttcttgtggcagtaacagtgatagtgggacatgccagagtccaagtttagaagaacccatggaggatgaaagtgaaattgaagaattctacaatggcttagaagatgagcctgatgttccagagagagctggaggagctggatttgggactgatggagatgatcaagaggcaattaatgaagctatatctgtgaaacaggaagtaacagacatgaactatccatcaaacaaatcatag

SEQ ID NO: 994 - RNA, 80 nt, synthetic construct; identical to SEQ ID NO: 317
  source 1..80: mol_type = other RNA

SEQ ID NO: 995 - RNA, 97 nt, synthetic construct; identical to SEQ ID NO: 321
  source 1..97: mol_type = other RNA

SEQ ID NO: 996 - RNA, 118 nt, synthetic construct
  source 1..118: mol_type = other RNA
gttctgtcttttggtcaggacaaccgtctagctataagtgctgcagggtgtgagaaactcctattgctggacgatgtctcttacgaggcattagcacagagtctctcagctggtacac

SEQ ID NO: 997 - RNA, 119 nt, synthetic construct
  source 1..119: mol_type = other RNA
gttctgtcttttggtcaggacaaccgtctagctataagtgctgcagggtgtgaggaaactcctattgctggacgatgtctcttacgaggcattagcacaccgattttgattctcaaaca

SEQ ID NO: 998 - RNA, 117 nt, synthetic construct
  source 1..117: mol_type = other RNA
gttctgtcttttggtcaggacaaccgtctagctataagtgctgcagggtgtgagaaactcctattgctggacgatgtctcttacgaggcattagcactcaaacaaatgtgcacaaag

SEQ ID NO: 999 - RNA, 118 nt, synthetic construct
  source 1..118: mol_type = other RNA
gttctgtcttttggtcaggacaaccgtctagctataagtgctgcagggtgtgagaaactcctattgctggacgatgtctcttacgaggcattagcactcaaacaaatgtgtcacaaag

SEQ ID NO: 1000 - RNA, 117 nt, synthetic construct
  source 1..117: mol_type = other RNA
gttctgtcttttggtcaggacaaccgtctagctataagtgctgcagggtgtgagaaactcctattgctggacgatgtctcttacgaggcattagcactttgagaatcaaaatcggta

SEQ ID NO: 1001 - RNA, 118 nt, synthetic construct
  source 1..118: mol_type = other RNA
gttctgtcttttggtcaggacaaccgtctagctataagtgctgcagggtgtgagaaactcctattgctggacgatgtctcttacgaggcattagcactgatgtgtatatcacagacaa

SEQ ID NO: 1002 - RNA, 116 nt, synthetic construct
  source 1..116: mol_type = other RNA
gttctgtcttttggtcaggacaaccgtctagctataagtgctgcagggtgtgagaaactcctattgctggacgatgtctcttacgaggcattagcagttgctccaggccacagcat

SEQ ID NO: 1003 - RNA, 118 nt, synthetic construct
  source 1..118: mol_type = other RNA
gttctgtcttttggtcaggacaaccgtctagctataagtgctgcagggtgtgagaaactcctattgctggacgatgtctcttacgaggcattagcacttccagaagacaccttcttcc

SEQ ID NO: 1004 - RNA, 118 nt, synthetic construct
  source 1..118: mol_type = other RNA
gttctgtcttttggtcaggacaaccgtctagctataagtgctgcagggtgtgagaaactcctattgctggacgatgtctcttacgaggcattagcaccagaagacaccttcttcccca

SEQ ID NO: 1005 - RNA, 117 nt, synthetic construct
  source 1..117: mol_type = other RNA
gttctgtcttttggtcaggacaaccgtctagctataagtgctgcagggtgtgagagaaactcctattgctggacgatgtctcttacgaggcattagcacggttccgaatcctcctga

SEQ ID NO: 1006 - RNA, 118 nt, synthetic construct
  source 1..118: mol_type = other RNA
gttctgtcttttggtcaggacaaccgtctagctataagtgctgcagggtgtgagaaactcctattgctggacgatgtctcttacgaggcattagcacggaacccaatcactgacaggt

SEQ ID NO: 1007 - RNA, 117 nt, synthetic construct
  source 1..117: mol_type = other RNA
gttctgtcttttggtcaggacaaccgtctagctataagtgctgcagggtgtgagaaactcctattgctggacgatgtctcttacgaggcattagcacagagtctctcagctggtaca

SEQ ID NO: 1008 - RNA, 117 nt, synthetic construct
  source 1..117: mol_type = other RNA
gttctgtcttttggtcaggacaaccgtctagctataagtgctgcagggtgtgagaaactcctattgctggacgatgtctcttacgaggcattagcacaccgattttgattctcaaac

SEQ ID NO: 1009 - RNA, 117 nt, synthetic construct
  source 1..117: mol_type = other RNA
gttctgtcttttggtcaggacaaccgtctagctataagtgctgcagggtgtgagaaactcctattgctggacgatgtctcttacgaggcattagcactgattctcaaacaaatgtgt

SEQ ID NO: 1010 - RNA, 117 nt, synthetic construct
  source 1..117: mol_type = other RNA
gttctgtcttttggtcaggacaaccgtctagctataagtgctgcagggtgtgagaaactcctattgctggacgatgtctcttacgaggcattagcactcaaacaaatgtgtcacaaa

SEQ ID NO: 1011 - RNA, 117 nt, synthetic construct
  source 1..117: mol_type = other RNA
gttctgtcttttggtcaggacaaccgtctagctataagtgctgcagggtgtgagaaactcctattgctggacgatgtctcttacgaggcattagcacgtttgagaatcaaaatcggt

SEQ ID NO: 1012 - RNA, 117 nt, synthetic construct
  source 1..117: mol_type = other RNA
gttctgtcttttggtcaggacaaccgtctagctataagtgctgcagggtgtgagaaactcctattgctggacgatgtctcttacgaggcattagcactgatgtgtatatcacagaca

SEQ ID NO: 1013 - RNA, 117 nt, synthetic construct
  source 1..117: mol_type = other RNA
gttctgtcttttggtcaggacaaccgtctagctataagtgctgcagggtgtgagaaactcctattgctggacgatgtctcttacgaggcattagcacgttgctccaggccacagcac

SEQ ID NO: 1014 - RNA, 117 nt, synthetic construct
  source 1..117: mol_type = other RNA
gttctgtcttttggtcaggacaaccgtctagctataagtgctgcagggtgtgagaaactcctattgctggacgatgtctcttacgaggcattagcacttccagaagacaccttcttc

SEQ ID NO: 1015 - RNA, 117 nt, synthetic construct
  source 1..117: mol_type = other RNA
gttctgtcttttggtcaggacaaccgtctagctataagtgctgcagggtgtgagaaactcctattgctggacgatgtctcttacgaggcattagcaccagaagacaccttcttcccc

SEQ ID NO: 1016 - RNA, 117 nt, synthetic construct
  source 1..117: mol_type = other RNA
gttctgtcttttggtcaggacaaccgtctagctataagtgctgcagggtgtgagaaactcctattgctggacgatgtctcttacgaggcattagcacggttccgaatcctcctcctg

SEQ ID NO: 1017 - RNA, 117 nt, synthetic construct
  source 1..117: mol_type = other RNA
gttctgtcttttggtcaggacaaccgtctagctataagtgctgcagggtgtgagaaactcctattgctggacgatgtctcttacgaggcattagcacggaacccaatcactgacagg

SEQ ID NO: 1018 - RNA, 108 nt, synthetic construct
  source 1..108: mol_type = other RNA
gacctatagggtcaatgaatctgtgcgtgtgccataagtaattaaaaattacccaccacaggagcacctgaaaacaggtgcttggcacagagtctctcagctggtaca

SEQ ID NO: 1019 - RNA, 108 nt, synthetic construct
  source 1..108: mol_type = other RNA
gacctatagggtcaatgaatctgtgcgtgtgccataagtaattaaaaattacccaccacaggagcacctgaaaacaggtgcttggcacaccgattttgattctcaaac

SEQ ID NO: 1020 - RNA, 108 nt, synthetic construct
  source 1..108: mol_type = other RNA
gacctatagggtcaatgaatctgtgcgtgtgccataagtaattaaaaattacccaccacaggagcacctgaaaacaggtgcttggcactgattctcaaacaaatgtgt

SEQ ID NO: 1021 - RNA, 108 nt, synthetic construct
  source 1..108: mol_type = other RNA
gacctatagggtcaatgaatctgtgcgtgtgccataagtaattaaaaattacccaccacaggagcacctgaaaacaggtgcttggcactcaaacaaatgtgtcacaaa

SEQ ID NO: 1022 - RNA, 108 nt, synthetic construct
  source 1..108: mol_type = other RNA
gacctatagggtcaatgaatctgtgcgtgtgccataagtaattaaaaattacccaccacaggagcacctgaaaacaggtgcttggcacgtttgagaatcaaaatcggt

SEQ ID NO: 1023 - RNA, 108 nt, synthetic construct
  source 1..108: mol_type = other RNA
gacctatagggtcaatgaatctgtgcgtgtgccataagtaattaaaaattacccaccacaggagcacctgaaaacaggtgcttggcactgatgtgtatatcacagaca

SEQ ID NO: 1024 - RNA, 108 nt, synthetic construct
  source 1..108: mol_type = other RNA
gacctatagggtcaatgaatctgtgcgtgtgccataagtaattaaaaattacccaccacaggagcacctgaaaacaggtgcttggcacgttgctccaggccacagcac

SEQ ID NO: 1025 - RNA, 108 nt, synthetic construct
  source 1..108: mol_type = other RNA
gacctatagggtcaatgaatctgtgcgtgtgccataagtaattaaaaattacccaccacaggagcacctgaaaacaggtgcttggcacttccagaagacaccttcttc

SEQ ID NO: 1026 - RNA, 108 nt, synthetic construct
  source 1..108: mol_type = other RNA
gacctatagggtcaatgaatctgtgcgtgtgccataagtaattaaaaattacccaccacaggagcacctgaaaacaggtgcttggcaccagaagacaccttcttcccc

SEQ ID NO: 1027 - RNA, 108 nt, synthetic construct
  source 1..108: mol_type = other RNA
gacctatagggtcaatgaatctgtgcgtgtgccataagtaattaaaaattacccaccacaggagcacctgaaaacaggtgcttggcacggttccgaatcctcctcctg

SEQ ID NO: 1028 - RNA, 108 nt, synthetic construct
  source 1..108: mol_type = other RNA
gacctatagggtcaatgaatctgtgcgtgtgccataagtaattaaaaattacccaccacaggagcacctgaaaacaggtgcttggcacggaacccaatcactgacagg

SEQ ID NO: 1029 - RNA, 100 nt, synthetic construct
  source 1..100: mol_type = other RNA
ttcgtatctgtaaaaccaaggttttagagctagaaatagcaagttaaaataaggctagtccgttatcaacttgaaaaagtggcaccgagtcggtgctttt

SEQ ID NO: 1030 - RNA, 100 nt, synthetic construct
  source 1..100: mol_type = other RNA
ttacctgtaccataaccagggttttagagctagaaatagcaagttaaaataaggctagtccgttatcaacttgaaaaagtggcaccgagtcggtgctttt

SEQ ID NO: 1031 - RNA, 100 nt, synthetic construct
  source 1..100: mol_type = other RNA
ctcttacctgtaccataaccgttttagagctagaaatagcaagttaaaataaggctagtccgttatcaacttgaaaaagtggcaccgagtcggtgctttt

SEQ ID NO: 1032 - RNA, 100 nt, synthetic construct
  source 1..100: mol_type = other RNA
tgcacctctggggaggacctgttttagagctagaaatagcaagttaaaataaggctagtccgttatcaacttgaaaaagtggcaccgagtcggtgctttt

SEQ ID NO: 1033 - RNA, 100 nt, synthetic construct
  source 1..100: mol_type = other RNA
cctacctgtcaccaggaccagttttagagctagaaatagcaagttaaaataaggctagtccgttatcaacttgaaaaagtggcaccgagtcggtgctttt

SEQ ID NO: 1034 - RNA, 100 nt, synthetic construct
  source 1..100: mol_type = other RNA
cacctacctaagaaccatccgttttagagctagaaatagcaagttaaaataaggctagtccgttatcaacttgaaaaagtggcaccgagtcggtgctttt

SEQ ID NO: 1035 - RNA, 20 nt, synthetic construct
  source 1..20: mol_type = other RNA
agacctggctatggtgagaa

SEQ ID NO: 1036 - RNA, 20 nt, synthetic construct
  source 1..20: mol_type = other RNA
gcactgcactataaagaacc

SEQ ID NO: 1037 - RNA, 20 nt, synthetic construct
  source 1..20: mol_type = other RNA
tagtgcagtgctggagttcg

SEQ ID NO: 1038 - RNA, 20 nt, synthetic construct
  source 1..20: mol_type = other RNA
agaaacctgtctggttctgt

SEQ ID NO: 1039 - RNA, 20 nt, synthetic construct
  source 1..20: mol_type = other RNA
tgatgttacctgcagggttg

SEQ ID NO: 1040 - RNA, 20 nt, synthetic construct
  source 1..20: mol_type = other RNA
ctgcaggtaacatcatgtct

SEQ ID NO: 1041 - RNA, 20 nt, synthetic construct
  source 1..20: mol_type = other RNA
accaggtatgttcatggagt

SEQ ID NO: 1042 - RNA, 20 nt, synthetic construct
  source 1..20: mol_type = other RNA
ttccagcaactgtggataca

SEQ ID NO: 1043 - RNA, 20 nt, synthetic construct
  source 1..20: mol_type = other RNA
tccacagttgctggaagtgc

SEQ ID NO: 1044 - RNA, 20 nt, synthetic construct
  source 1..20: mol_type = other RNA
ggtgctcacactagtggtcc

SEQ ID NO: 1045 - RNA, 20 nt, synthetic construct
  source 1..20: mol_type = other RNA
gggacctcacctccacagcc

SEQ ID NO: 1046 - RNA, 20 nt, synthetic construct
  source 1..20: mol_type = other RNA
ggacctcacctccacagcct

SEQ ID NO: 1047 - RNA, 20 nt, synthetic construct
  source 1..20: mol_type = other RNA
atacctgcctgtgcaggtag

SEQ ID NO: 1048 - RNA, 20 nt, synthetic construct
  source 1..20: mol_type = other RNA
gcttccatacctgcctgtgc

SEQ ID NO: 1049 - RNA, 20 nt, synthetic construct
  source 1..20: mol_type = other RNA
tcatctcaggtggctgcagt

SEQ ID NO: 1050 - RNA, 20 nt, synthetic construct
  source 1..20: mol_type = other RNA
ttcatctcaggtggctgcag

SEQ ID NO: 1051 - RNA, 20 nt, synthetic construct
  source 1..20: mol_type = other RNA
gtacctgtgtcatagccctg

SEQ ID NO: 1052 - RNA, 20 nt, synthetic construct
  source 1..20: mol_type = other RNA
gtctacctctgcagagcaaa

SEQ ID NO: 1053 - RNA, 20 nt, synthetic construct
  source 1..20: mol_type = other RNA
cgtctacctctgcagagcaa

SEQ ID NO: 1054 - RNA, 20 nt, synthetic construct
  source 1..20: mol_type = other RNA
ctgcagaggtagacgaggct

SEQ ID NO: 1055 - RNA, 20 nt, synthetic construct
  source 1..20: mol_type = other RNA
tctgcagaggtagacgaggc

SEQ ID NO: 1056 - RNA, 20 nt, synthetic construct
  source 1..20: mol_type = other RNA
ttgctctgcagaggtagacg

SEQ ID NO: 1057 - RNA, 20 nt, synthetic construct
  source 1..20: mol_type = other RNA
ctccacctgaggaaagacat

SEQ ID NO: 1058 - RNA, 20 nt, synthetic construct
  source 1..20: mol_type = other RNA
ctgactcacccaaaacagca

SEQ ID NO: 1059 - RNA, 20 nt, synthetic construct
  source 1..20: mol_type = other RNA
cacccaaaacagcaaggaca

SEQ ID NO: 1060 - RNA, 20 nt, synthetic construct
  source 1..20: mol_type = other RNA
cctacctgccaaaggagaag

SEQ ID NO: 1061 - RNA, 20 nt, synthetic construct
  source 1..20: mol_type = other RNA
ccccacagctcactgtctgc

SEQ ID NO: 1062 - RNA, 20 nt, synthetic construct
  source 1..20: mol_type = other RNA
cagacagtgagctgtggggt

SEQ ID NO: 1063 - RNA, 20 nt, synthetic construct
  source 1..20: mol_type = other RNA
ccccacctgtcttagtctcc

SEQ ID NO: 1064 - RNA, 20 nt, synthetic construct
  source 1..20: mol_type = other RNA
tcttaggggagctgaactca

SEQ ID NO: 1065 - RNA, 20 nt, synthetic construct
  source 1..20: mol_type = other RNA
tcccctaagaaggacagagc

SEQ ID NO: 1066 - RNA, 20 nt, synthetic construct
  source 1..20: mol_type = other RNA
atcaggtgagcgtgcatgta

SEQ ID NO: 1067 - RNA, 20 nt, synthetic construct
  source 1..20: mol_type = other RNA
tcttccaggtgctgcacttg

SEQ ID NO: 1068 - RNA, 20 nt, synthetic construct
  source 1..20: mol_type = other RNA
ctcttccaggtgctgcactt

SEQ ID NO: 1069 - RNA, 20 nt, synthetic construct
  source 1..20: mol_type = other RNA
cctcttccaggtgctgcact

SEQ ID NO: 1070 - RNA, 20 nt, synthetic construct
  source 1..20: mol_type = other RNA
cttccaggtgctgcacttgg

SEQ ID NO: 1071 - RNA, 20 nt, synthetic construct
  source 1..20: mol_type = other RNA
cagggtctggaaaacaggaa

SEQ ID NO: 1072 - RNA, 20 nt, synthetic construct
  source 1..20: mol_type = other RNA
agggtctggaaaacaggaat

SEQ ID NO: 1073 - RNA, 20 nt, synthetic construct
  source 1..20: mol_type = other RNA
ctttcaggcaccttgagcac

SEQ ID NO: 1074 - RNA, 20 nt, synthetic construct
  source 1..20: mol_type = other RNA
cctcacccacctggctgtgc

SEQ ID NO: 1075 - RNA, 20 nt, synthetic construct
  source 1..20: mol_type = other RNA
ctgcacaggtggtttcagtt

SEQ ID NO: 1076 - RNA, 20 nt, synthetic construct
  source 1..20: mol_type = other RNA
gctgcacaggtggtttcagt

SEQ ID NO: 1077 - RNA, 20 nt, synthetic construct
  source 1..20: mol_type = other RNA
ccacctgtgcagcagggaca

SEQ ID NO: 1078 - RNA, 20 nt, synthetic construct
  source 1..20: mol_type = other RNA
cacctgtgcagcagggacag

SEQ ID NO: 1079 - RNA, 20 nt, synthetic construct
  source 1..20: mol_type = other RNA
accacctgtgcagcagggac

SEQ ID NO: 1080 - RNA, 20 nt, synthetic construct
  source 1..20: mol_type = other RNA
tcctcagatgtaggggagaa

SEQ ID NO: 1081 - RNA, 20 nt, synthetic construct
  source 1..20: mol_type = other RNA
ttcctcagatgtaggggaga

SEQ ID NO: 1082 - RNA, 20 nt, synthetic construct
  source 1..20: mol_type = other RNA
tcgccgactgggtgctgctc

SEQ ID NO: 1083 - RNA, 20 nt, synthetic construct
  source 1..20: mol_type = other RNA
gtgctcttcccagacccatt

SEQ ID NO: 1084 - RNA, 20 nt, synthetic construct
  source 1..20: mol_type = other RNA
tgtgctcttcccagacccat

SEQ ID NO: 1085 - RNA, 20 nt, synthetic construct
  source 1..20: mol_type = other RNA
tgggtctgggaagagcacag

SEQ ID NO: 1086 - RNA, 20 nt, synthetic construct
  source 1..20: mol_type = other RNA
gtcgctgaccccctgacagc

SEQ ID NO: 1087 - RNA, 20 nt, synthetic construct
  source 1..20: mol_type = other RNA
tcagcgacaggcagtggcgt

SEQ ID NO: 1088 - RNA, 20 nt, synthetic construct
  source 1..20: mol_type = other RNA
ggataagtacacacggtttc

SEQ ID NO: 1089 - RNA, 20 nt, synthetic construct
  source 1..20: mol_type = other RNA
tcatccaggataagtacaca

SEQ ID NO: 1090 - RNA, 20 nt, synthetic construct
  source 1..20: mol_type = other RNA
gggcactggtggcatcatcc

SEQ ID NO: 1091 - RNA, 20 nt, synthetic construct
  source 1..20: mol_type = other RNA
gtttgcatccagggcactgg

SEQ ID NO: 1092 - RNA, 20 nt, synthetic construct
  source 1..20: mol_type = other RNA
catcacccagcacctcagcc

SEQ ID NO: 1093 - RNA, 20 nt, synthetic construct
  source 1..20: mol_type = other RNA
cacccagcacctcagcctgg

SEQ ID NO: 1094 - RNA, 19 nt, synthetic construct
  source 1..19: mol_type = other RNA
ggtggacgcggctttactg

SEQ ID NO: 1095 - RNA, 20 nt, synthetic construct
  source 1..20: mol_type = other RNA
tgcgggacagaaacaacgtc

SEQ ID NO: 1096 - RNA, 20 nt, synthetic construct
  source 1..20: mol_type = other RNA
ggacccgcgggtctcgtaca

SEQ ID NO: 1097 - RNA, 20 nt, synthetic construct
  source 1..20: mol_type = other RNA
catccaggatgaggacccgc

SEQ ID NO: 1098 - RNA, 20 nt, synthetic construct
  source 1..20: mol_type = other RNA
tcatccaggatgaggacccg

SEQ ID NO: 1099 - RNA, 20 nt, synthetic construct
  source 1..20: mol_type = other RNA
gcgggtcctcatcctggatg

SEQ ID NO: 1100 - RNA, 20 nt, synthetic construct
  source 1..20: mol_type = other RNA
gggcactagtagcctcatcc

SEQ ID NO: 1101 - RNA, 20 nt, synthetic construct
  source 1..20: mol_type = other RNA
cctagatgtgcagtgcgagc

SEQ ID NO: 1102 - RNA, 20 nt, synthetic construct
  source 1..20: mol_type = other RNA
actcacgctggatagcctcc

SEQ ID NO: 1103 - RNA, 20 nt, synthetic construct
  source 1..20: mol_type = other RNA
cacagcccaagatagttaag

SEQ ID NO: 1104 - RNA, 20 nt, synthetic construct
  source 1..20: mol_type = other RNA
acagcccaagatagttaagt

SEQ ID NO: 1105 - RNA, 20 nt, synthetic construct
  source 1..20: mol_type = other RNA
cagcccaagatagttaagtg

SEQ ID NO: 1106 - RNA, 20 nt, synthetic construct
  source 1..20: mol_type = other RNA
ttaccccacttaactatctt

SEQ ID NO: 1107 - RNA, 20 nt, synthetic construct
  source 1..20: mol_type = other RNA
cttaccccacttaactatct

SEQ ID NO: 1108 - RNA, 20 nt, synthetic construct
  source 1..20: mol_type = other RNA
tcgatctatgaaaaagacag

SEQ ID NO: 1109 - RNA, 19 nt, synthetic construct
  source 1..19: mol_type = other RNA
ctcacgctggatagcctcc

SEQ ID NO: 1110 - RNA, 18 nt, synthetic construct
  source 1..18: mol_type = other RNA
tcacgctggatagcctcc

SEQ ID NO: 1111 - RNA, 20 nt, synthetic construct
  source 1..20: mol_type = other RNA
cgcgagcacagctaaggcca

SEQ ID NO: 1112 - RNA, 20 nt, synthetic construct
  source 1..20: mol_type = other RNA
gagtagcgcgagcacagcta

SEQ ID NO: 1113 - RNA, 20 nt, synthetic construct
  source 1..20: mol_type = other RNA
gctactctctctttctggcc

SEQ ID NO: 1114 - RNA, 20 nt, synthetic construct
  source 1..20: mol_type = other RNA
cgtgagtaaacctgaatctt

SEQ ID NO: 1115 - RNA, 20 nt, synthetic construct
  source 1..20: mol_type = other RNA
tttgactttccattctctgc

SEQ ID NO: 1116 - RNA, 20 nt, synthetic construct
  source 1..20: mol_type = other RNA
acccagacacatagcaattc

SEQ ID NO: 1117 - RNA, 20 nt, synthetic construct
  source 1..20: mol_type = other RNA
aagtcaacttcaatgtcgga

SEQ ID NO: 1118 - RNA, 20 nt, synthetic construct
  source 1..20: mol_type = other RNA
cagtaagtcaacttcaatgt

SEQ ID NO: 1119 - RNA, 20 nt, synthetic construct
  source 1..20: mol_type = other RNA
gaagttgacttactgaagaa

SEQ ID NO: 1120 - RNA, 20 nt, synthetic construct
  source 1..20: mol_type = other RNA
tggagagagaattgaaaaag

SEQ ID NO: 1121 - RNA, 20 nt, synthetic construct
  source 1..20: mol_type = other RNA
ttcagacttgtctttcagca

SEQ ID NO: 1122 - RNA, 20 nt, synthetic construct
  source 1..20: mol_type = other RNA
acttgtctttcagcaaggac

SEQ ID NO: 1123 - RNA, 20 nt, synthetic construct
  source 1..20: mol_type = other RNA
atactcatctttttcagtgg

SEQ ID NO: 1124 - RNA, 20 nt, synthetic construct
  source 1..20: mol_type = other RNA
catactcatctttttcagtg

SEQ ID NO: 1125 - RNA, 20 nt, synthetic construct
  source 1..20: mol_type = other RNA
gcatactcatctttttcagt

SEQ ID NO: 1126 - RNA, 20 nt, synthetic construct
  source 1..20: mol_type = other RNA
ggcatactcatctttttcag

SEQ ID NO: 1127 - RNA, 20 nt, synthetic construct
  source 1..20: mol_type = other RNA
agtcacatggttcacacggc

SEQ ID NO: 1128 - RNA, 20 nt, synthetic construct
  source 1..20: mol_type = other RNA
acaaagtcacatggttcaca

SEQ ID NO: 1129 - RNA, 20 nt, synthetic construct
  source 1..20: mol_type = other RNA
tgggctgtgacaaagtcaca

SEQ ID NO: 1130 - RNA, 20 nt, synthetic construct
  source 1..20: mol_type = other RNA
aagcatgtgctccagaggtt

SEQ ID NO: 1131 - RNA, 20 nt, synthetic construct
  source 1..20: mol_type = other RNA
gaagcatgtgctccagaggt

SEQ ID NO: 1132 - RNA, 20 nt, synthetic construct
  source 1..20: mol_type = other RNA
ttcttacccagggtacaggg

SEQ ID NO: 1133 - RNA, 20 nt, synthetic construct
  source 1..20: mol_type = other RNA
ttcttacccagggtacaggg

SEQ ID NO: 1134 - RNA, 20 nt, synthetic construct
  source 1..20: mol_type = other RNA
cgaccagaagattgtagaat

SEQ ID NO: 1135 - RNA, 20 nt, synthetic construct
  source 1..20: mol_type = other RNA
tcgaccagaagattgtagaa

SEQ ID NO: 1136 - RNA, 20 nt, synthetic construct
  source 1..20: mol_type = other RNA
aatcccattctacaatcttc

SEQ ID NO: 1137 - RNA, 20 nt, synthetic construct
  source 1..20: mol_type = other RNA
tgcaatccattctactccaa

SEQ ID NO: 1138 - RNA, 20 nt, synthetic construct
  source 1..20: mol_type = other RNA
ggtccatgaggagccagccc

SEQ ID NO: 1139 - RNA, 20 nt, synthetic construct
  source 1..20: mol_type = other RNA
tgcagggttcaccagccagc

SEQ ID NO: 1140 - RNA, 20 nt, synthetic construct
  source 1..20: mol_type = other RNA
cgaaaactgcgaggagacca

SEQ ID NO: 1141 - RNA, 20 nt, synthetic construct
  source 1..20: mol_type = other RNA
aggctgcaagattgtggcaa

SEQ ID NO: 1142 - RNA, 20 nt, synthetic construct
  source 1..20: mol_type = other RNA
tgccagagctccagacctgc

SEQ ID NO: 1143 - RNA, 20 nt, synthetic construct
  source 1..20: mol_type = other RNA
atactcactccacttcctcc

SEQ ID NO: 1144 - RNA, 20 nt, synthetic construct
  source 1..20: mol_type = other RNA
atactcactccacttcctcc

SEQ ID NO: 1145 - RNA, 20 nt, synthetic construct
  source 1..20: mol_type = other RNA
aggctgtggagagcaggaga

SEQ ID NO: 1146 - RNA, 20 nt, synthetic construct
  source 1..20: mol_type = other RNA
tccacagcctcagtaacaac

SEQ ID NO: 1147 - RNA, 20 nt, synthetic construct
  source 1..20: mol_type = other RNA
gcaggctgtgaagacaaaag

SEQ ID NO: 1148 - RNA, 20 nt, synthetic construct
  source 1..20: mol_type = other RNA
caggctgtgaagacaaaaga

SEQ ID NO: 1149 - RNA, 20 nt, synthetic construct
  source 1..20: mol_type = other RNA
gccctggagggacatcacca

SEQ ID NO: 1150 - RNA, 20 nt, synthetic construct
  source 1..20: mol_type = other RNA
ctgggcaggctgacacattg

SEQ ID NO: 1151 - RNA, 20 nt, synthetic construct
  source 1..20: mol_type = other RNA
atctccagcctcagtgagaa

SEQ ID NO: 1152 - RNA, 20 nt, synthetic construct
  source 1..20: mol_type = other RNA
actgaggctggagatcacag

SEQ ID NO: 1153 - RNA, 20 nt, synthetic construct
  source 1..20: mol_type = other RNA
acgctcacctgatgtccaag

SEQ ID NO: 1154 - RNA, 20 nt, synthetic construct
  source 1..20: mol_type = other RNA
acgctcacctgatgtccaag

SEQ ID NO: 1155 - RNA, 20 nt, synthetic construct
  source 1..20: mol_type = other RNA
cctagggatatgtgggccac

SEQ ID NO: 1156 - RNA, 20 nt, synthetic construct
  source 1..20: mol_type = other RNA
ctgaggctgcaaaggggcaa

SEQ ID NO: 1157 - RNA, 20 nt, synthetic construct
  source 1..20: mol_type = other RNA
gacaatctgtgaaacaaagc

SEQ ID NO: 1158 - RNA, 20 nt, synthetic construct
  source 1..20: mol_type = other RNA
ccttttcaggctgagccaga

SEQ ID NO: 1159 - RNA, 20 nt, synthetic construct
  source 1..20: mol_type = other RNA
cttttcaggctgagccagac

SEQ ID NO: 1160 - RNA, 20 nt, synthetic construct
  source 1..20: mol_type = other RNA
gacctggatcagacaggacc

SEQ ID NO: 1161 - RNA, 20 nt, synthetic construct
  source 1..20: mol_type = other RNA
caacttactccacctggctg

SEQ ID NO: 1162 - RNA, 20 nt, synthetic construct
  source 1..20: mol_type = other RNA
caacttactccacctggctg

SEQ ID NO: 1163 - RNA, 20 nt, synthetic construct
  source 1..20: mol_type = other RNA
cttacttcactgaggcctcc

SEQ ID NO: 1164 - RNA, 20 nt, synthetic construct
  source 1..20: mol_type = other RNA
cttacttcactgaggcctcc

SEQ ID NO: 1165 - RNA, 20 nt, synthetic construct
  source 1..20: mol_type = other RNA
gctcacccaaagccacagcg

SEQ ID NO: 1166 - RNA, 20 nt, synthetic construct
  source 1..20: mol_type = other RNA
gctcacccaaagccacagcg

SEQ ID NO: 1167 - RNA, 20 nt, synthetic construct
  source 1..20: mol_type = other RNA
gctcttacctgctacctcca

SEQ ID NO: 1168 - RNA, 20 nt, synthetic construct
  source 1..20: mol_type = other RNA
gctcttacctgctacctcca

SEQ ID NO: 1169 - RNA, 20 nt, synthetic construct
  source 1..20: mol_type = other RNA
aaagacctggcaggcagaag

SEQ ID NO: 1170 - RNA, 20 nt, synthetic construct
  source 1..20: mol_type = other RNA
gaaccaacactcgatcaccg

SEQ ID NO: 1171 - RNA, 20 nt, synthetic construct
  source 1..20: mol_type = other RNA
gctggcccatttcgcagagg

SEQ ID NO: 1172 - RNA, 20 nt, synthetic construct
  source 1..20: mol_type = other RNA
ctggcccatttcgcagaggc

SEQ ID NO: 1173 - RNA, 20 nt, synthetic construct
  source 1..20: mol_type = other RNA
accacagccagagcctcagc

SEQ ID NO: 1174 - RNA, 20 nt, synthetic construct
  source 1..20: mol_type = other RNA
actgggacaagatgctctgc

SEQ ID NO: 1175 - RNA, 20 nt, synthetic construct
  source 1..20: mol_type = other RNA
cgtcgccactctagcccaaa

SEQ ID NO: 1176 - RNA, 20 nt, synthetic construct
  source 1..20: mol_type = other RNA
gcgacgccagcacctgggta

SEQ ID NO: 1177 - RNA, 20 nt, synthetic construct
  source 1..20: mol_type = other RNA
cgacgccagcacctgggtaa

SEQ ID NO: 1178 - RNA, 20 nt, synthetic construct
  source 1..20: mol_type = other RNA
atcccaagcagcaaatgcca

SEQ ID NO: 1179 - RNA, 20 nt, synthetic construct
  source 1..20: mol_type = other RNA
acagttcaaccctttcagga

SEQ ID NO: 1180 - RNA, 20 nt, synthetic construct
  source 1..20: mol_type = other RNA
ctttcaggagggcacctatc

SEQ ID NO: 1181 - RNA, 20 nt, synthetic construct
  source 1..20: mol_type = other RNA
cctgcaaggacaggtcaccc

SEQ ID NO: 1182 - RNA, 20 nt, synthetic construct
  source 1..20: mol_type = other RNA
cgagagccacctctgcccct

SEQ ID NO: 1183 - RNA, 20 nt, synthetic construct
  source 1..20: mol_type = other RNA
aactggcatggcccgagcca

SEQ ID NO: 1184 - RNA, 20 nt, synthetic construct
  source 1..20: mol_type = other RNA
cactcaccggttcctggggg

SEQ ID NO: 1185 - RNA, 20 nt, synthetic construct
  source 1..20: mol_type = other RNA
cactcaccggttcctggggg

SEQ ID NO: 1186 - RNA, 20 nt, synthetic construct
  source 1..20: mol_type = other RNA
cgcaggggacgtcgtcgtgc

SEQ ID NO: 1187 - RNA, 20 nt, synthetic construct
  source 1..20: mol_type = other RNA
cacactcacagtacacggtg

SEQ ID NO: 1188 - RNA, 20 nt, synthetic construct
  source 1..20: mol_type = other RNA
cacactcacagtacacggtg

SEQ ID NO: 1189 - RNA, 20 nt, synthetic construct
  source 1..20: mol_type = other RNA
tggtcctgggagagacagaa

SEQ ID NO: 1190 - RNA, 20 nt, synthetic construct
  source 1..20: mol_type = other RNA
ttcctcacctttgacctgga

SEQ ID NO: 1191 - RNA, 20 nt, synthetic construct
  source 1..20: mol_type = other RNA
ttcctcacctttgacctgga

SEQ ID NO: 1192 - RNA, 20 nt, synthetic construct
  source 1..20: mol_type = other RNA
cctacaggtgcccaacatgg

SEQ ID NO: 1193 - RNA, 20 nt, synthetic construct
  source 1..20: mol_type = other RNA
tgtcacagctgacttgggcg

SEQ ID NO: 1194 - RNA, 20 nt, synthetic construct
  source 1..20: mol_type = other RNA
aacgcagggccccagctatt

SEQ ID NO: 1195 - RNA, 20 nt, synthetic construct
  source 1..20: mol_type = other RNA
cccgcagggcagcaggagcg

SEQ ID NO: 1196 - RNA, 20 nt, synthetic construct
  source 1..20: mol_type = other RNA
gagtgccaggtgatttgggc

SEQ ID NO: 1197 - RNA, 20 nt, synthetic construct
  source 1..20: mol_type = other RNA
cggggccatggggctgggcc

SEQ ID NO: 1198 - RNA, 20 nt, synthetic construct
  source 1..20: mol_type = other RNA
tcaccagcagcagctcccgg

SEQ ID NO: 1199 - RNA, 20 nt, synthetic construct
  source 1..20: mol_type = other RNA
tcaccagcagcagctcccgg

SEQ ID NO: 1200 - RNA, 20 nt, synthetic construct
  source 1..20: mol_type = other RNA
cactcaccagcagcagctcc

SEQ ID NO: 1201 - RNA, 20 nt, synthetic construct
  source 1..20: mol_type = other RNA
cactcaccagcagcagctcc

SEQ ID NO: 1202 - RNA, 20 nt, synthetic construct
  source 1..20: mol_type = other RNA
ggcaggcttgcattccctcc

SEQ ID NO: 1203 - RNA, 20 nt, synthetic construct
  source 1..20: mol_type = other RNA
ggcaggcttgcattccctcc

SEQ ID NO: 1204 - RNA, 20 nt, synthetic construct
  source 1..20: mol_type = other RNA
cgtcggtacctgttctcctc

SEQ ID NO: 1205 - RNA, 20 nt, synthetic construct
  source 1..20: mol_type = other RNA
cgtcggtacctgttctcctc

SEQ ID NO: 1206 - RNA, 20 nt, synthetic construct
  source 1..20: mol_type = other RNA
ttcttctccagtgcccccca

SEQ ID NO: 1207 - RNA, 20 nt, synthetic construct
  source 1..20: mol_type = other RNA
taggctcaccagagggcaca

SEQ ID NO: 1208 - RNA, 20 nt, synthetic construct
  source 1..20: mol_type = other RNA
taggctcaccagagggcaca

SEQ ID NO: 1209 - RNA, 20 nt, synthetic construct
  source 1..20: mol_type = other RNA
ctgtccattcctcagtctcc

SEQ ID NO: 1210 - RNA, 20 nt, synthetic construct
  source 1..20: mol_type = other RNA
tgtcccatgtcttatttccc

SEQ ID NO: 1211 - RNA, 20 nt, synthetic construct
  source 1..20: mol_type = other RNA
cccgccttctaaatctcccc

SEQ ID NO: 1212 - RNA, 20 nt, synthetic construct
  source 1..20: mol_type = other RNA
ggaattttctcttccaagcg

SEQ ID NO: 1213 - RNA, 20 nt, synthetic construct
  source 1..20: mol_type = other RNA
aagagaaaattccagtgggc

SEQ ID NO: 1214 - RNA, 20 nt, synthetic construct
  source 1..20: mol_type = other RNA
ggagagggcggggccacgct

SEQ ID NO: 1215 - RNA, 20 nt, synthetic construct
  source 1..20: mol_type = other RNA
ccgccctctccgctcgtgat

SEQ ID NO: 1216 - RNA, 20 nt, synthetic construct
  source 1..20: mol_type = other RNA
agggccaatcacgagcggag

SEQ ID NO: 1217 - RNA, 20 nt, synthetic construct
  source 1..20: mol_type = other RNA
tcgtgattggccctaagttc

SEQ ID NO: 1218 - RNA, 20 nt, synthetic construct
  source 1..20: mol_type = other RNA
aggggccatggggctgggcc

SEQ ID NO: 1219 - RNA, 20 nt, synthetic construct
  source 1..20: mol_type = other RNA
actcaccagcggcggctgcc

SEQ ID NO: 1220 - RNA, 20 nt, synthetic construct
  source 1..20: mol_type = other RNA
actcaccagcggcggctgcc

SEQ ID NO: 1221 - RNA, 20 nt, synthetic construct
  source 1..20: mol_type = other RNA
ctcaccagcggcggctgccg

SEQ ID NO: 1222 - RNA, 20 nt, synthetic construct
  source 1..20: mol_type = other RNA
ctcaccagcggcggctgccg

SEQ ID NO: 1223 - RNA, 20 nt, synthetic construct
  source 1..20: mol_type = other RNA
cactcaccagcggcggctgc

SEQ ID NO: 1224 - RNA, 20 nt, synthetic construct
  source 1..20: mol_type = other RNA
cactcaccagcggcggctgc

SEQ ID NO: 1225 - RNA, 20 nt, synthetic construct
  source 1..20: mol_type = other RNA
ctacagcgatatctgaaatc

SEQ ID NO: 1226 - RNA, 20 nt, synthetic construct
  source 1..20: mol_type = other RNA
gtcggtacctgttctcctga

SEQ ID NO: 1227 - RNA, 20 nt, synthetic construct
  source 1..20: mol_type = other RNA
gtcggtacctgttctcctga

SEQ ID NO: 1228 - RNA, 20 nt, synthetic construct
  source 1..20: mol_type = other RNA
caggctcaccagagggcaca

SEQ ID NO: 1229 - RNA, 20 nt, synthetic construct
  source 1..20: mol_type = other RNA
caggctcaccagagggcaca

SEQ ID NO: 1230 - RNA, 20 nt, synthetic construct
  source 1..20: mol_type = other RNA
gaggcgcatggcggcgaggt

SEQ ID NO: 1231 - RNA, 20 nt, synthetic construct
  source 1..20: mol_type = other RNA
gaggcgcatggcggcgaggt

SEQ ID NO: 1232 - RNA, 20 nt, synthetic construct
  source 1..20: mol_type = other RNA
cgcatggcggcgaggtgggg

SEQ ID NO: 1233 - RNA, 20 nt, synthetic construct
  source 1..20: mol_type = other RNA
cgcatggcggcgaggtgggg

SEQ ID NO: 1234 - RNA, 20 nt, synthetic construct
  source 1..20: mol_type = other RNA
aggcgcatggcggcgaggtg

SEQ ID NO: 1235 - RNA, 20 nt, synthetic construct
  source 1..20: mol_type = other RNA
aggcgcatggcggcgaggtg

SEQ ID NO: 1236 - RNA, 20 nt, synthetic construct
  source 1..20: mol_type = other RNA
ttcccacagggtaatgatgg

SEQ ID NO: 1237 - RNA, 20 nt, synthetic construct
  source 1..20: mol_type = other RNA
acgcctacaattggaaaaca

SEQ ID NO: 1238 - RNA, 20 nt, synthetic construct
  source 1..20: mol_type = other RNA
cgcctacaattggaaaacaa

SEQ ID NO: 1239 - RNA, 20 nt, synthetic construct
  source 1..20: mol_type = other RNA
caattgtaggcgtgatggga

SEQ ID NO: 1240 - RNA, 20 nt, synthetic construct
  source 1..20: mol_type = other RNA
tgctgagctgttaataaaac

SEQ ID NO: 1241 - RNA, 20 nt, synthetic construct
  source 1..20: mol_type = other RNA
acttaccctctgacttcata

SEQ ID NO: 1242 - RNA, 20 nt, synthetic construct
  source 1..20: mol_type = other RNA
acttaccctctgacttcata

SEQ ID NO: 1243 - RNA, 20 nt, synthetic construct
  source 1..20: mol_type = other RNA
tcacttacttcatatttctt

SEQ ID NO: 1244 - RNA, 20 nt, synthetic construct
  source 1..20: mol_type = other RNA
tcacttacttcatatttctt

SEQ ID NO: 1245 - RNA, 22 nt, synthetic construct
  source 1..22: mol_type = other RNA
cattctttacgggccgcctcac

SEQ ID NO: 1246 - RNA, 22 nt, synthetic construct
  source 1..22: mol_type = other RNA
tttacgggccgcctcactgact

SEQ ID NO: 1247 - RNA, 22 nt, synthetic construct
  source 1..22: mol_type = other RNA
tacaagatggctcagccgatac

SEQ ID NO: 1248 - RNA, 22 nt, synthetic construct
  source 1..22: mol_type = other RNA
tcaccatagccaggtctggggg

SEQ ID NO: 1249 - RNA, 22 nt, synthetic construct
  source 1..22: mol_type = other RNA
tctgagtgagaatctgagctta

SEQ ID NO: 1250 - RNA, 22 nt, synthetic construct
  source 1..22: mol_type = other RNA
tcactcagagaatcactcaggg

SEQ ID NO: 1251 - RNA, 22 nt, synthetic construct
  source 1..22: mol_type = other RNA
ctgtggtacctggtgcgaggcc

SEQ ID NO: 1252 - RNA, 22 nt, synthetic construct
  source 1..22: mol_type = other RNA
tcccaccttcttgggcagaagg

SEQ ID NO: 1253 - RNA, 22 nt, synthetic construct
  source 1..22: mol_type = other RNA
ccgcacctgcacttccagcaac

SEQ ID NO: 1254 - RNA, 22 nt, synthetic construct
  source 1..22: mol_type = other RNA
aggctctgtcggccatgcctac

SEQ ID NO: 1255 - RNA, 22 nt, synthetic construct
  source 1..22: mol_type = other RNA
gtggggacactgctgctcccgc

SEQ ID NO: 1256 - RNA, 22 nt, synthetic construct
  source 1..22: mol_type = other RNA
atccctcactattctggtcgtg

SEQ ID NO: 1257 - RNA, 22 nt, synthetic construct
  source 1..22: mol_type = other RNA
tggtcgtgtgattgacatcctg

SEQ ID NO: 1258 - RNA, 22 nt, synthetic construct
  source 1..22: mol_type = other RNA
tgacccccatgcctttgccagt

SEQ ID NO: 1259 - RNA, 22 nt, synthetic construct
  source 1..22: mol_type = other RNA
gagacatggtgtaggtgaagca

SEQ ID NO: 1260 - RNA, 22 nt, synthetic construct
  source 1..22: mol_type = other RNA
aaaggaagccagttactcatca

SEQ ID NO: 1261 - RNA, 22 nt, synthetic construct
  source 1..22: mol_type = other RNA
tgaagggcatgtgcagcagaga

SEQ ID NO: 1262 - RNA, 22 nt, synthetic construct
  source 1..22: mol_type = other RNA
ttcaagggcctctttatagcga

SEQ ID NO: 1263 - RNA, 22 nt, synthetic construct
  source 1..22: mol_type = other RNA
ggctgtcggtccatgtaggaga

SEQ ID NO: 1264 - RNA, 22 nt, synthetic construct
  source 1..22: mol_type = other RNA
cacaaccccctgcagagtggtg

SEQ ID NO: 1265 - RNA, 20 nt, synthetic construct
  source 1..20: mol_type = other RNA
tgacggccatcctcggcgtc

SEQ ID NO: 1266 - RNA, 20 nt, synthetic construct
  source 1..20: mol_type = other RNA
gacggccatcctcggcgtct

SEQ ID NO: 1267 - RNA, 20 nt, synthetic construct
  source 1..20: mol_type = other RNA
acggccatcctcggcgtctg

SEQ ID NO: 1268 - RNA, 20 nt, synthetic construct
  source 1..20: mol_type = other RNA
cgcactcacccgcccaggtc

SEQ ID NO: 1269 - RNA, 20 nt, synthetic construct
  source 1..20: mol_type = other RNA
gcactcacccgcccaggtct

SEQ ID NO: 1270 - RNA, 19 nt, synthetic construct
  source 1..19: mol_type = other RNA
cccaggctcgcactccatg

SEQ ID NO: 1271 - RNA, 20 nt, synthetic construct
  source 1..20: mol_type = other RNA
gtcactcaccggcctcgctc

SEQ ID NO: 1272 - RNA, 20 nt, synthetic construct
  source 1..20: mol_type = other RNA
ccttaccccatctcagggtg

SEQ ID NO: 1273 - RNA, 20 nt, synthetic construct
  source 1..20: mol_type = other RNA
cttaccccatctcagggtga

SEQ ID NO: 1274 - RNA, 20 nt, synthetic construct
  source 1..20: mol_type = other RNA
ggctctgggaaaagagggga

SEQ ID NO: 1275 - RNA, 20 nt, synthetic construct
  source 1..20: mol_type = other RNA
cttcccacagatagaaaagg

SEQ ID NO: 1276 - RNA, 20 nt, synthetic construct
  source 1..20: mol_type = other RNA
ttcccacagatagaaaagga

SEQ ID NO: 1277 - RNA, 20 nt, synthetic construct
  source 1..20: mol_type = other RNA
cccaggcagtgacagtgccc

SEQ ID NO: 1278 - RNA, 20 nt, synthetic construct
  source 1..20: mol_type = other RNA
ccaggcagtgacagtgccca

SEQ ID NO: 1279 - RNA, 20 nt, synthetic construct
  source 1..20: mol_type = other RNA
gacccgcatctcggcgtctg

SEQ ID NO: 1280 - RNA, 20 nt, synthetic construct
  source 1..20: mol_type = other RNA
gcactcaccggcccaggtct

SEQ ID NO: 1281 - RNA, 20 nt, synthetic construct
  source 1..20: mol_type = other RNA
tgggagcctgggggcgagga

SEQ ID NO: 1282 - RNA, 20 nt, synthetic construct
  source 1..20: mol_type = other RNA
gggagcctgggggcgaggag

SEQ ID NO: 1283 - RNA, 20 nt, synthetic construct
  source 1..20: mol_type = other RNA
ccccaggctcccactccatg

SEQ ID NO: 1284 - RNA, 20 nt, synthetic construct
  source 1..20: mol_type = other RNA
ttaccccatctcagggtgag

SEQ ID NO: 1285 - RNA, 20 nt, synthetic construct
  source 1..20: mol_type = other RNA
ttcccacaggtggaaaagga

SEQ ID NO: 1286 - RNA, 20 nt, synthetic construct
  source 1..20: mol_type = other RNA
tgacccgcatctcggcgtct

SEQ ID NO: 1287 - RNA, 20 nt, synthetic construct
  source 1..20: mol_type = other RNA
gcactcacaggcccaggtct

SEQ ID NO: 1288 - RNA, 20 nt, synthetic construct
  source 1..20: mol_type = other RNA
cacaggcccaggtctcggtc

SEQ ID NO: 1289 - RNA, 20 nt, synthetic construct
  source 1..20: mol_type = other RNA
agaccctggccccgcccccg

SEQ ID NO: 1290 - RNA, 20 nt, synthetic construct
  source 1..20: mol_type = other RNA
ggctctgggaaaggagggga

SEQ ID NO: 1291 - RNA, 20 nt, synthetic construct
  source 1..20: mol_type = other RNA
cccagccagcaacagtgccc

SEQ ID NO: 1292 - RNA, 22 nt, synthetic construct
  source 1..22: mol_type = other RNA
ggaccgggagacacagaagtac

SEQ ID NO: 1293 - RNA, 22 nt, synthetic construct
  source 1..22: mol_type = other RNA
catcgccctgaacgaggacctg

SEQ ID NO: 1294 - RNA, 22 nt, synthetic construct
  source 1..22: mol_type = other RNA
catcgccctgaacgaggatctg

SEQ ID NO: 1295 - RNA, 22 nt, synthetic construct
  source 1..22: mol_type = other RNA
ttgctggcctggctgtcctagc

SEQ ID NO: 1296 - RNA, 22 nt, synthetic construct
  source 1..22: mol_type = other RNA
catcgccctgaacgaggacctg

SEQ ID NO: 1297 - RNA, 20 nt, synthetic construct
  source 1..20: mol_type = other RNA
cgggccatggagggcccggg

SEQ ID NO: 1298 - RNA, 20 nt, synthetic construct
  source 1..20: mol_type = other RNA
gggccatggagggcccggga

SEQ ID NO: 1299 - RNA, 20 nt, synthetic construct
  source 1..20: mol_type = other RNA
ggccatggagggcccgggag

SEQ ID NO: 1300 - RNA, 20 nt, synthetic construct
  source 1..20: mol_type = other RNA
ctcacctatgactctgagcc

SEQ ID NO: 1301 - RNA, 20 nt, synthetic construct
  source 1..20: mol_type = other RNA
ttggctggggagaggaggag

SEQ ID NO: 1302 - RNA, 20 nt, synthetic construct
  source 1..20: mol_type = other RNA
tggctggggagaggaggaga

SEQ ID NO: 1303 - RNA, 20 nt, synthetic construct
  source 1..20: mol_type = other RNA
tacactcacagcgtacagag

SEQ ID NO: 1304 - RNA, 20 nt, synthetic construct
  source 1..20: mol_type = other RNA
acactcacagcgtacagaga

SEQ ID NO: 1305 - RNA, 20 nt, synthetic construct
  source 1..20: mol_type = other RNA
ggagggtctgggggaaatgg

SEQ ID NO: 1306 - RNA, 20 nt, synthetic construct
  source 1..20: mol_type = other RNA
gagggtctgggggaaatggg

SEQ ID NO: 1307 - RNA, 20 nt, synthetic construct
  source 1..20: mol_type = other RNA
caggctgtggggtaggaggt

SEQ ID NO: 1308 - RNA, 20 nt, synthetic construct
  source 1..20: mol_type = other RNA
gggctgtagtgggagagggg

SEQ ID NO: 1309 - RNA, 20 nt, synthetic construct
  source 1..20: mol_type = other RNA
ggagggctgtagtgggagag

SEQ ID NO: 1310 - RNA, 20 nt, synthetic construct
  source 1..20: mol_type = other RNA
tcctacctgctcagtgcatg

SEQ ID NO: 1311 - RNA, 20 nt, synthetic construct
  source 1..20: mol_type = other RNA
catttcctggaggtagagag

SEQ ID NO: 1312 - RNA, 20 nt, synthetic construct
  source 1..20: mol_type = other RNA
gcaaccatggctcgtcgggc

SEQ ID NO: 1313 - RNA, 20 nt, synthetic construct
  source 1..20: mol_type = other RNA
actcaccaaagcagtgcagc

SEQ ID NO: 1314 - RNA, 20 nt, synthetic construct
  source 1..20: mol_type = other RNA
ctcaccgctgcttgggatac

SEQ ID NO: 1315 - RNA, 20 nt, synthetic construct
  source 1..20: mol_type = other RNA
accgcccagacccggagcag

SEQ ID NO: 1316 - RNA, 20 nt, synthetic construct
  source 1..20: mol_type = other RNA
gcggggtctgagtgtagaga

SEQ ID NO: 1317 - RNA, 20 nt, synthetic construct
  source 1..20: mol_type = other RNA
gaggtccagggtctcaggtc

SEQ ID NO: 1318 - RNA, 20 nt, synthetic construct
  source 1..20: mol_type = other RNA
gtagaatccagtcagtgagg

SEQ ID NO: 1319 - RNA, 20 nt, synthetic construct
  source 1..20: mol_type = other RNA
gaaccaacactcgatcaccg

SEQ ID NO: 1320 - RNA, 20 nt, synthetic construct
  source 1..20: mol_type = other RNA
aggtccagggtctcaggtca

SEQ ID NO: 1321 - RNA, 20 nt, synthetic construct
  source 1..20: mol_type = other RNA
gctcacccaaagccacagcg

SEQ ID NO: 1322 - RNA, 20 nt, synthetic construct
  source 1..20: mol_type = other RNA
cacccagcacctcagcctgg

SEQ ID NO: 1323 - RNA, 20 nt, synthetic construct
  source 1..20: mol_type = other RNA
aagccagttactcatcaggg

SEQ ID NO: 1324 - RNA, 20 nt, synthetic construct
  source 1..20: mol_type = other RNA
actcacgctggatagcctcc

SEQ ID NO: 1325 - RNA, 20 nt, synthetic construct
  source 1..20: mol_type = other RNA
tgttccgagagctgatctca

SEQ ID NO: 1326 - RNA, 20 nt, synthetic construct
  source 1..20: mol_type = other RNA
cccctggagaaagagaagag

SEQ ID NO: 1327 - RNA, 20 nt, synthetic construct
  source 1..20: mol_type = other RNA
ccctccaggctgccttcagg

SEQ ID NO: 1328 - RNA, 20 nt, synthetic construct
  source 1..20: mol_type = other RNA
ctccacctgaggaaagacat

SEQ ID NO: 1329 - RNA, 20 nt, synthetic construct
  source 1..20: mol_type = other RNA
ttccgagagctgatctcatg

SEQ ID NO: 1330 - RNA, 20 nt, synthetic construct
  source 1..20: mol_type = other RNA
aagtcaacttcaatgtcgga

SEQ ID NO: 1331 - RNA, 20 nt, synthetic construct
  source 1..20: mol_type = other RNA
gcacctgtccccctgtgggc

SEQ ID NO: 1332 - RNA, 20 nt, synthetic construct
  source 1..20: mol_type = other RNA
ctccccatgagatcagctct

SEQ ID NO: 1333 - RNA, 20 nt, synthetic construct
  source 1..20: mol_type = other RNA
ggactctccgcgccccggtg

SEQ ID NO: 1334 - RNA, 20 nt, synthetic construct
  source 1..20: mol_type = other RNA
tggcccatttcgcagaggcg

SEQ ID NO: 1335 - RNA, 20 nt, synthetic construct
  source 1..20: mol_type = other RNA
ggatttgcctagcttcccca

SEQ ID NO: 1336 - RNA, 20 nt, synthetic construct
  source 1..20: mol_type = other RNA
ctggcccatttcgcagaggc

SEQ ID NO: 1337 - RNA, 20 nt, synthetic construct
  source 1..20: mol_type = other RNA
tcgatctatgaaaaagacag

SEQ ID NO: 1338 - RNA, 20 nt, synthetic construct
  source 1..20: mol_type = other RNA
gacccagaagccaactatgg

SEQ ID NO: 1339 - RNA, 20 nt, synthetic construct
  source 1..20: mol_type = other RNA
ttgtgccacagggctgctgc

SEQ ID NO: 1340 - RNA, 20 nt, synthetic construct
  source 1..20: mol_type = other RNA
gtacctgtgtcatagccctg

SEQ ID NO: 1341 - RNA, 20 nt, synthetic construct
  source 1..20: mol_type = other RNA
cctacctgccaaaggagaag

SEQ ID NO: 1342 - RNA, 100 nt, synthetic construct
  source 1..100: mol_type = other RNA
agacctggctatggtgagaagttttagagctagaaatagcaagttaaaataaggctagtccgttatcaacttgaaaaagtggcaccgagtcggtgctttt

SEQ ID NO: 1343 - RNA, 100 nt, synthetic construct
  source 1..100: mol_type = other RNA
gcactgcactataaagaaccgttttagagctagaaatagcaagttaaaataaggctagtccgttatcaacttgaaaaagtggcaccgagtcggtgctttt

SEQ ID NO: 1344 - RNA, 100 nt, synthetic construct
  source 1..100: mol_type = other RNA
tagtgcagtgctggagttcggttttagagctagaaatagcaagttaaaataaggctagtccgttatcaacttgaaaaagtggcaccgagtcggtgctttt

SEQ ID NO: 1345 - RNA, 100 nt, synthetic construct
  source 1..100: mol_type = other RNA
agaaacctgtctggttctgtgttttagagctagaaatagcaagttaaaataaggctagtccgttatcaacttgaaaaagtggcaccgagtcggtgctttt

SEQ ID NO: 1346 - RNA, 100 nt, synthetic construct
  source 1..100: mol_type = other RNA
tgatgttacctgcagggttggttttagagctagaaatagcaagttaaaataaggctagtccgttatcaacttgaaaaagtggcaccgagtcggtgctttt

SEQ ID NO: 1347 - RNA, 100 nt, synthetic construct
  source 1..100: mol_type = other RNA
ctgcaggtaacatcatgtctgttttagagctagaaatagcaagttaaaataaggctagtccgttatcaacttgaaaaagtggcaccgagtcggtgctttt

SEQ ID NO: 1348 - RNA, 100 nt, synthetic construct
  source 1..100: mol_type = other RNA
accaggtatgttcatggagtgttttagagctagaaatagcaagttaaaataaggctagtccgttatcaacttgaaaaagtggcaccgagtcggtgctttt

SEQ ID NO: 1349 - RNA, 100 nt, synthetic construct
  source 1..100: mol_type = other RNA
ttccagcaactgtggatacagttttagagctagaaatagcaagttaaaataaggctagtccgttatcaacttgaaaaagtggcaccgagtcggtgctttt

SEQ ID NO: 1350 - RNA, 100 nt, synthetic construct
  source 1..100: mol_type = other RNA
tccacagttgctggaagtgcgttttagagctagaaatagcaagttaaaataaggctagtccgttatcaacttgaaaaagtggcaccgagtcggtgctttt

SEQ ID NO: 1351 - RNA, 100 nt, synthetic construct
  source 1..100: mol_type = other RNA
ggtgctcacactagtggtccgttttagagctagaaatagcaagttaaaataaggctagtccgttatcaacttgaaaaagtggcaccgagtcggtgctttt

SEQ ID NO: 1352 - RNA, 100 nt, synthetic construct
  source 1..100: mol_type = other RNA
gggacctcacctccacagccgttttagagctagaaatagcaagttaaaataaggctagtccgttatcaacttgaaaaagtggcaccgagtcggtgctttt

SEQ ID NO: 1353 - RNA, 100 nt, synthetic construct
  source 1..100: mol_type = other RNA
ggacctcacctccacagcctgttttagagctagaaatagcaagttaaaataaggctagtccgttatcaacttgaaaaagtggcaccgagtcggtgctttt

SEQ ID NO: 1354 - RNA, 100 nt, synthetic construct
  source 1..100: mol_type = other RNA
atacctgcctgtgcaggtaggttttagagctagaaatagcaagttaaaataaggctagtccgttatcaacttgaaaaagtggcaccgagtcggtgctttt

SEQ ID NO: 1355 - RNA, 100 nt, synthetic construct
  source 1..100: mol_type = other RNA
gcttccatacctgcctgtgcgttttagagctagaaatagcaagttaaaataaggctagtccgttatcaacttgaaaaagtggcaccgagtcggtgctttt

SEQ ID NO: 1356 - RNA, 100 nt, synthetic construct
  source 1..100: mol_type = other RNA
tcatctcaggtggctgcagtgttttagagctagaaatagcaagttaaaataaggctagtccgttatcaacttgaaaaagtggcaccgagtcggtgctttt

SEQ ID NO: 1357 - RNA, 100 nt, synthetic construct
  source 1..100: mol_type = other RNA
ttcatctcaggtggctgcaggttttagagctagaaatagcaagttaaaataaggctagtccgttatcaacttgaaaaagtggcaccgagtcggtgctttt

SEQ ID NO: 1358 - RNA, 100 nt, synthetic construct
  source 1..100: mol_type = other RNA
gtacctgtgtcatagccctggttttagagctagaaatagcaagttaaaataaggctagtccgttatcaacttgaaaaagtggcaccgagtcggtgctttt

SEQ ID NO: 1359 - RNA, 100 nt, synthetic construct
  source 1..100: mol_type = other RNA
gtctacctctgcagagcaaagttttagagctagaaatagcaagttaaaataaggctagtccgttatcaacttgaaaaagtggcaccgagtcggtgctttt

SEQ ID NO: 1360 - RNA, 100 nt, synthetic construct
  source 1..100: mol_type = other RNA
cgtctacctctgcagagcaagttttagagctagaaatagcaagttaaaataaggctagtccgttatcaacttgaaaaagtggcaccgagtcggtgctttt

SEQ ID NO: 1361 - RNA, 100 nt, synthetic construct
  source 1..100: mol_type = other RNA
ctgcagaggtagacgaggctgttttagagctagaaatagcaagttaaaataaggctagtccgttatcaacttgaaaaagtggcaccgagtcggtgctttt

SEQ ID NO: 1362 - RNA, 100 nt, synthetic construct
  source 1..100: mol_type = other RNA
tctgcagaggtagacgaggcgttttagagctagaaatagcaagttaaaataaggctagtccgttatcaacttgaaaaagtggcaccgagtcggtgctttt

SEQ ID NO: 1363 - RNA, 100 nt, synthetic construct
  source 1..100: mol_type = other RNA
ttgctctgcagaggtagacggttttagagctagaaatagcaagttaaaataaggctagtccgttatcaacttgaaaaagtggcaccgagtcggtgctttt

SEQ ID NO: 1364 - RNA, 100 nt, synthetic construct
  source 1..100: mol_type = other RNA
ctccacctgaggaaagacatgttttagagctagaaatagcaagttaaaataaggctagtccgttatcaacttgaaaaagtggcaccgagtcggtgctttt

SEQ ID NO: 1365 - RNA, 100 nt, synthetic construct
  source 1..100: mol_type = other RNA
ctgactcacccaaaacagcagttttagagctagaaatagcaagttaaaataaggctagtccgttatcaacttgaaaaagtggcaccgagtcggtgctttt

SEQ ID NO: 1366 - RNA, 100 nt, synthetic construct
  source 1..100: mol_type = other RNA
cacccaaaacagcaaggacagttttagagctagaaatagcaagttaaaataaggctagtccgttatcaacttgaaaaagtggcaccgagtcggtgctttt

SEQ ID NO: 1367 - RNA, 100 nt, synthetic construct
  source 1..100: mol_type = other RNA
cctacctgccaaaggagaaggttttagagctagaaatagcaagttaaaataaggctagtccgttatcaacttgaaaaagtggcaccgagtcggtgctttt

SEQ ID NO: 1368 - RNA, 100 nt, synthetic construct
  source 1..100: mol_type = other RNA
ccccacagctcactgtctgcgttttagagctagaaatagcaagttaaaataaggctagtccgttatcaacttgaaaaagtggcaccgagtcggtgctttt

SEQ ID NO: 1369 - RNA, 100 nt, synthetic construct
  source 1..100: mol_type = other RNA
cagacagtgagctgtggggtgttttagagctagaaatagcaagttaaaataaggctagtccgttatcaacttgaaaaagtggcaccgagtcggtgctttt

SEQ ID NO: 1370 - RNA, 100 nt, synthetic construct
  source 1..100: mol_type = other RNA
ccccacctgtcttagtctccgttttagagctagaaatagcaagttaaaataaggctagtccgttatcaacttgaaaaagtggcaccgagtcggtgctttt

SEQ ID NO: 1371 - RNA, 100 nt, synthetic construct
  source 1..100: mol_type = other RNA
tcttaggggagctgaactcagttttagagctagaaatagcaagttaaaataaggctagtccgttatcaacttgaaaaagtggcaccgagtcggtgctttt

SEQ ID NO: 1372 - RNA, 100 nt, synthetic construct
  source 1..100: mol_type = other RNA
tcccctaagaaggacagagcgttttagagctagaaatagcaagttaaaataaggctagtccgttatcaacttgaaaaagtggcaccgagtcggtgctttt

SEQ ID NO: 1373 - RNA, 100 nt, synthetic construct
  source 1..100: mol_type = other RNA
atcaggtgagcgtgcatgtagttttagagctagaaatagcaagttaaaataaggctagtccgttatcaacttgaaaaagtggcaccgagtcggtgctttt

SEQ ID NO: 1374 - RNA, 100 nt, synthetic construct
  source 1..100: mol_type = other RNA
tcttccaggtgctgcacttggttttagagctagaaatagcaagttaaaataaggctagtccgttatcaacttgaaaaagtggcaccgagtcggtgctttt

SEQ ID NO: 1375 - RNA, 100 nt, synthetic construct
  source 1..100: mol_type = other RNA
ctcttccaggtgctgcacttgttttagagctagaaatagcaagttaaaataaggctagtccgttatcaacttgaaaaagtggcaccgagtcggtgctttt

SEQ ID NO: 1376 - RNA, 100 nt, synthetic construct
  source 1..100: mol_type = other RNA
cctcttccaggtgctgcactgttttagagctagaaatagcaagttaaaataaggctagtccgttatcaacttgaaaaagtggcaccgagtcggtgctttt

SEQ ID NO: 1377 - RNA, 100 nt, synthetic construct
  source 1..100: mol_type = other RNA
cttccaggtgctgcacttgggttttagagctagaaatagcaagttaaaataaggctagtccgttatcaacttgaaaaagtggcaccgagtcggtgctttt

SEQ ID NO: 1378 - RNA, 100 nt, synthetic construct
  source 1..100: mol_type = other RNA
cagggtctggaaaacaggaagttttagagctagaaatagcaagttaaaataaggctagtccgttatcaacttgaaaaagtggcaccgagtcggtgctttt

SEQ ID NO: 1379 - RNA, 100 nt, synthetic construct
  source 1..100: mol_type = other RNA
agggtctggaaaacaggaatgttttagagctagaaatagcaagttaaaataaggctagtccgttatcaacttgaaaaagtggcaccgagtcggtgctttt

SEQ ID NO: 1380 - RNA, 100 nt, synthetic construct
  source 1..100: mol_type = other RNA
ctttcaggcaccttgagcacgttttagagctagaaatagcaagttaaaataaggctagtccgttatcaacttgaaaaagtggcaccgagtcggtgctttt

SEQ ID NO: 1381 - RNA, 100 nt, synthetic construct
  source 1..100: mol_type = other RNA
cctcacccacctggctgtgcgttttagagctagaaatagcaagttaaaataaggctagtccgttatcaacttgaaaaagtggcaccgagtcggtgctttt

SEQ ID NO: 1382 - RNA, 100 nt, synthetic construct
  source 1..100: mol_type = other RNA
ctgcacaggtggtttcagttgttttagagctagaaatagcaagttaaaataaggctagtccgttatcaacttgaaaaagtggcaccgagtcggtgctttt

SEQ ID NO: 1383 - RNA, 100 nt, synthetic construct
  source 1..100: mol_type = other RNA
gctgcacaggtggtttcagtgttttagagctagaaatagcaagttaaaataaggctagtccgttatcaacttgaaaaagtggcaccgagtcggtgctttt

SEQ ID NO: 1384 - RNA, 100 nt, synthetic construct
  source 1..100: mol_type = other RNA
ccacctgtgcagcagggacagttttagagctagaaatagcaagttaaaataaggctagtccgttatcaacttgaaaaagtggcaccgagtcggtgctttt

SEQ ID NO: 1385 - RNA, 100 nt, synthetic construct
  source 1..100: mol_type = other RNA
cacctgtgcagcagggacaggttttagagctagaaatagcaagttaaaataaggctagtccgttatcaacttgaaaaagtggcaccgagtcggtgctttt

SEQ ID NO: 1386 - RNA, 100 nt, synthetic construct
  source 1..100: mol_type = other RNA
accacctgtgcagcagggacgttttagagctagaaatagcaagttaaaataaggctagtccgttatcaacttgaaaaagtggcaccgagtcggtgctttt

SEQ ID NO: 1387 - RNA, 100 nt, synthetic construct
  source 1..100: mol_type = other RNA
tcctcagatgtaggggagaagttttagagctagaaatagcaagttaaaataaggctagtccgttatcaacttgaaaaagtggcaccgagtcggtgctttt

SEQ ID NO: 1388 - RNA, 100 nt, synthetic construct
  source 1..100: mol_type = other RNA
ttcctcagatgtaggggagagttttagagctagaaatagcaagttaaaataaggctagtccgttatcaacttgaaaaagtggcaccgagtcggtgctttt

SEQ ID NO: 1389 - RNA, 100 nt, synthetic construct
  source 1..100: mol_type = other RNA
tcgccgactgggtgctgctcgttttagagctagaaatagcaagttaaaataaggctagtccgttatcaacttgaaaaagtggcaccgagtcggtgctttt

SEQ ID NO: 1390 - RNA, 100 nt, synthetic construct
  source 1..100: mol_type = other RNA
gtgctcttcccagacccattgttttagagctagaaatagcaagttaaaataaggctagtccgttatcaacttgaaaaagtggcaccgagtcggtgctttt

SEQ ID NO: 1391 - RNA, 100 nt, synthetic construct
  source 1..100: mol_type = other RNA
tgtgctcttcccagacccatgttttagagctagaaatagcaagttaaaataaggctagtccgttatcaacttgaaaaagtggcaccgagtcggtgctttt

SEQ ID NO: 1392 - RNA, 100 nt, synthetic construct
  source 1..100: mol_type = other RNA
tgggtctgggaagagcacaggttttagagctagaaatagcaagttaaaataaggctagtccgttatcaacttgaaaaagtggcaccgagtcggtgctttt

SEQ ID NO: 1393 - RNA, 100 nt, synthetic construct
  source 1..100: mol_type = other RNA
gtcgctgaccccctgacagcgttttagagctagaaatagcaagttaaaataaggctagtccgttatcaacttgaaaaagtggcaccgagtcggtgctttt

SEQ ID NO: 1394 - RNA, 100 nt, synthetic construct
  source 1..100: mol_type = other RNA
tcagcgacaggcagtggcgtgttttagagctagaaatagcaagttaaaataaggctagtccgttatcaacttgaaaaagtggcaccgagtcggtgctttt

SEQ ID NO: 1395 - RNA, 100 nt, synthetic construct
  source 1..100: mol_type = other RNA
ggataagtacacacggtttcgttttagagctagaaatagcaagttaaaataaggctagtccgttatcaacttgaaaaagtggcaccgagtcggtgctttt

SEQ ID NO: 1396 - RNA, 100 nt, synthetic construct
  source 1..100: mol_type = other RNA
tcatccaggataagtacacagttttagagctagaaatagcaagttaaaataaggctagtccgttatcaacttgaaaaagtggcaccgagtcggtgctttt

SEQ ID NO: 1397 - RNA, 100 nt, synthetic construct
  source 1..100: mol_type = other RNA
gggcactggtggcatcatccgttttagagctagaaatagcaagttaaaataaggctagtccgttatcaacttgaaaaagtggcaccgagtcggtgctttt

SEQ ID NO: 1398 - RNA, 100 nt, synthetic construct
  source 1..100: mol_type = other RNA
gtttgcatccagggcactgggttttagagctagaaatagcaagttaaaataaggctagtccgttatcaacttgaaaaagtggcaccgagtcggtgctttt

SEQ ID NO: 1399 - RNA, 100 nt, synthetic construct
  source 1..100: mol_type = other RNA
catcacccagcacctcagccgttttagagctagaaatagcaagttaaaataaggctagtccgttatcaacttgaaaaagtggcaccgagtcggtgctttt

SEQ ID NO: 1400 - RNA, 100 nt, synthetic construct
  source 1..100: mol_type = other RNA
cacccagcacctcagcctgggttttagagctagaaatagcaagttaaaataaggctagtccgttatcaacttgaaaaagtggcaccgagtcggtgctttt

SEQ ID NO: 1401 - RNA, 99 nt, synthetic construct
  source 1..99: mol_type = other RNA
ggtggacgcggctttactggttttagagctagaaatagcaagttaaaataaggctagtccgttatcaacttgaaaaagtggcaccgagtcggtgctttt

SEQ ID NO: 1402 - RNA, 100 nt, synthetic construct
  source 1..100: mol_type = other RNA
tgcgggacagaaacaacgtcgttttagagctagaaatagcaagttaaaataaggctagtccgttatcaacttgaaaaagtggcaccgagtcggtgctttt

SEQ ID NO: 1403 - RNA, 100 nt, synthetic construct
  source 1..100: mol_type = other RNA
ggacccgcgggtctcgtacagttttagagctagaaatagcaagttaaaataaggctagtccgttatcaacttgaaaaagtggcaccgagtcggtgctttt

SEQ ID NO: 1404 - RNA, 100 nt, synthetic construct
  source 1..100: mol_type = other RNA
catccaggatgaggacccgcgttttagagctagaaatagcaagttaaaataaggctagtccgttatcaacttgaaaaagtggcaccgagtcggtgctttt

SEQ ID NO: 1405 - RNA, 100 nt, synthetic construct
  source 1..100: mol_type = other RNA
tcatccaggatgaggacccggttttagagctagaaatagcaagttaaaataaggctagtccgttatcaacttgaaaaagtggcaccgagtcggtgctttt

SEQ ID NO: 1406 - RNA, 100 nt, synthetic construct
  source 1..100: mol_type = other RNA
gcgggtcctcatcctggatggttttagagctagaaatagcaagttaaaataaggctagtccgttatcaacttgaaaaagtggcaccgagtcggtgctttt

SEQ ID NO: 1407 - RNA, 100 nt, synthetic construct
  source 1..100: mol_type = other RNA
gggcactagtagcctcatccgttttagagctagaaatagcaagttaaaataaggctagtccgttatcaacttgaaaaagtggcaccgagtcggtgctttt

SEQ ID NO: 1408 - RNA, 100 nt, synthetic construct
  source 1..100: mol_type = other RNA
cctagatgtgcagtgcgagcgttttagagctagaaatagcaagttaaaataaggctagtccgttatcaacttgaaaaagtggcaccgagtcggtgctttt

SEQ ID NO: 1409 - RNA, 100 nt, synthetic construct; identical to SEQ ID NO: 500
  source 1..100: mol_type = other RNA

SEQ ID NO: 1410 - RNA, 100 nt, synthetic construct; identical to SEQ ID NO: 646
  source 1..100: mol_type = other RNA

SEQ ID NO: 1411 - RNA, 100 nt, synthetic construct; identical to SEQ ID NO: 647
  source 1..100: mol_type = other RNA

SEQ ID NO: 1412 - RNA, 100 nt, synthetic construct; identical to SEQ ID NO: 648
  source 1..100: mol_type = other RNA

SEQ ID NO: 1413 - RNA, 100 nt, synthetic construct; identical to SEQ ID NO: 649
  source 1..100: mol_type = other RNA

SEQ ID NO: 1414 - RNA, 100 nt, synthetic construct; identical to SEQ ID NO: 650
  source 1..100: mol_type = other RNA

SEQ ID NO: 1415 - RNA, 100 nt, synthetic construct; identical to SEQ ID NO: 651
  source 1..100: mol_type = other RNA

SEQ ID NO: 1416 - RNA, 99 nt, synthetic construct; identical to SEQ ID NO: 652
  source 1..99: mol_type = other RNA

SEQ ID NO: 1417 - RNA, 98 nt, synthetic construct; identical to SEQ ID NO: 653
  source 1..98: mol_type = other RNA

SEQ ID NO: 1418 - RNA, 100 nt, synthetic construct; identical to SEQ ID NO: 654
  source 1..100: mol_type = other RNA

SEQ ID NO: 1419 - RNA, 100 nt, synthetic construct; identical to SEQ ID NO: 655
  source 1..100: mol_type = other RNA

SEQ ID NO: 1420 - RNA, 100 nt, synthetic construct; identical to SEQ ID NO: 656
  source 1..100: mol_type = other RNA

SEQ ID NO: 1421 - RNA, 100 nt, synthetic construct; identical to SEQ ID NO: 657
  source 1..100: mol_type = other RNA

SEQ ID NO: 1422 - RNA, 100 nt, synthetic construct; identical to SEQ ID NO: 658
  source 1..100: mol_type = other RNA

SEQ ID NO: 1423 - RNA, 100 nt, synthetic construct; identical to SEQ ID NO: 659
  source 1..100: mol_type = other RNA

SEQ ID NO: 1424 - RNA, 100 nt, synthetic construct; identical to SEQ ID NO: 660
  source 1..100: mol_type = other RNA

SEQ ID NO: 1425 - RNA, 100 nt, synthetic construct; identical to SEQ ID NO: 661
  source 1..100: mol_type = other RNA

SEQ ID NO: 1426 - RNA, 100 nt, synthetic construct; identical to SEQ ID NO: 662
  source 1..100: mol_type = other RNA

SEQ ID NO: 1427 - RNA, 100 nt, synthetic construct; identical to SEQ ID NO: 663
  source 1..100: mol_type = other RNA

SEQ ID NO: 1428 - RNA, 100 nt, synthetic construct; identical to SEQ ID NO: 664
  source 1..100: mol_type = other RNA

SEQ ID NO: 1429 - RNA, 100 nt, synthetic construct; identical to SEQ ID NO: 665
  source 1..100: mol_type = other RNA

SEQ ID NO: 1430 - RNA, 100 nt, synthetic construct; identical to SEQ ID NO: 666
  source 1..100: mol_type = other RNA

SEQ ID NO: 1431 - RNA, 100 nt, synthetic construct; identical to SEQ ID NO: 667
  source 1..100: mol_type = other RNA

SEQ ID NO: 1432 - RNA, 100 nt, synthetic construct; identical to SEQ ID NO: 668
  source 1..100: mol_type = other RNA

SEQ ID NO: 1433 - RNA, 100 nt, synthetic construct; identical to SEQ ID NO: 669
  source 1..100: mol_type = other RNA

SEQ ID NO: 1434 - RNA, 100 nt, synthetic construct; identical to SEQ ID NO: 670
  source 1..100: mol_type = other RNA

SEQ ID NO: 1435 - RNA, 100 nt, synthetic construct; identical to SEQ ID NO: 671
  source 1..100: mol_type = other RNA

SEQ ID NO: 1436 - RNA, 100 nt, synthetic construct; identical to SEQ ID NO: 672
  source 1..100: mol_type = other RNA

SEQ ID NO: 1437 - RNA, 100 nt, synthetic construct; identical to SEQ ID NO: 492
  source 1..100: mol_type = other RNA

SEQ ID NO: 1438 - RNA, 100 nt, synthetic construct; identical to SEQ ID NO: 493
  source 1..100: mol_type = other RNA

SEQ ID NO: 1439 - RNA, 100 nt, synthetic construct; identical to SEQ ID NO: 494
  source 1..100: mol_type = other RNA

SEQ ID NO: 1440 - RNA, 100 nt, synthetic construct; identical to SEQ ID NO: 494
  source 1..100: mol_type = other RNA

SEQ ID NO: 1441 - RNA, 100 nt, synthetic construct; identical to SEQ ID NO: 495
  source 1..100: mol_type = other RNA

SEQ ID NO: 1442 - RNA, 100 nt, synthetic construct; identical to SEQ ID NO: 496
  source 1..100: mol_type = other RNA

SEQ ID NO: 1443 - RNA, 100 nt, synthetic construct; identical to SEQ ID NO: 497
  source 1..100: mol_type = other RNA

SEQ ID NO: 1444 - RNA, 100 nt, synthetic construct; identical to SEQ ID NO: 498
  source 1..100: mol_type = other RNA

SEQ ID NO: 1445 - RNA, 100 nt, synthetic construct
  source 1..100: mol_type = other RNA
ggtccatgaggagccagcccgttttagagctagaaatagcaagttaaaataaggctagtccgttatcaacttgaaaaagtggcaccgagtcggtgctttt

SEQ ID NO: 1446 - RNA, 100 nt, synthetic construct
  source 1..100: mol_type = other RNA
tgcagggttcaccagccagcgttttagagctagaaatagcaagttaaaataaggctagtccgttatcaacttgaaaaagtggcaccgagtcggtgctttt

SEQ ID NO: 1447 - RNA, 100 nt, synthetic construct
  source 1..100: mol_type = other RNA
cgaaaactgcgaggagaccagttttagagctagaaatagcaagttaaaataaggctagtccgttatcaacttgaaaaagtggcaccgagtcggtgctttt

SEQ ID NO: 1448 - RNA, 100 nt, synthetic construct
  source 1..100: mol_type = other RNA
aggctgcaagattgtggcaagttttagagctagaaatagcaagttaaaataaggctagtccgttatcaacttgaaaaagtggcaccgagtcggtgctttt

SEQ ID NO: 1449 - RNA, 100 nt, synthetic construct
  source 1..100: mol_type = other RNA
tgccagagctccagacctgcgttttagagctagaaatagcaagttaaaataaggctagtccgttatcaacttgaaaaagtggcaccgagtcggtgctttt

SEQ ID NO: 1450 - RNA, 100 nt, synthetic construct
  source 1..100: mol_type = other RNA
atactcactccacttcctccgttttagagctagaaatagcaagttaaaataaggctagtccgttatcaacttgaaaaagtggcaccgagtcggtgctttt

SEQ ID NO: 1451 - RNA, 100 nt, synthetic construct; identical to SEQ ID NO: 1450
  source 1..100: mol_type = other RNA

SEQ ID NO: 1452 - RNA, 100 nt, synthetic construct
  source 1..100: mol_type = other RNA
aggctgtggagagcaggagagttttagagctagaaatagcaagttaaaataaggctagtccgttatcaacttgaaaaagtggcaccgagtcggtgctttt

SEQ ID NO: 1453 - RNA, 100 nt, synthetic construct
  source 1..100: mol_type = other RNA
tccacagcctcagtaacaacgttttagagctagaaatagcaagttaaaataaggctagtccgttatcaacttgaaaaagtggcaccgagtcggtgctttt

SEQ ID NO: 1454 - RNA, 100 nt, synthetic construct
  source 1..100: mol_type = other RNA
gcaggctgtgaagacaaaaggttttagagctagaaatagcaagttaaaataaggctagtccgttatcaacttgaaaaagtggcaccgagtcggtgctttt

SEQ ID NO: 1455 - RNA, 100 nt, synthetic construct
  source 1..100: mol_type = other RNA
caggctgtgaagacaaaagagttttagagctagaaatagcaagttaaaataaggctagtccgttatcaacttgaaaaagtggcaccgagtcggtgctttt

SEQ ID NO: 1456 - RNA, 100 nt, synthetic construct
  source 1..100: mol_type = other RNA
gccctggagggacatcaccagttttagagctagaaatagcaagttaaaataaggctagtccgttatcaacttgaaaaagtggcaccgagtcggtgctttt

SEQ ID NO: 1457 - RNA, 100 nt, synthetic construct
  source 1..100: mol_type = other RNA
ctgggcaggctgacacattggttttagagctagaaatagcaagttaaaataaggctagtccgttatcaacttgaaaaagtggcaccgagtcggtgctttt

SEQ ID NO: 1458 - RNA, 100 nt, synthetic construct
  source 1..100: mol_type = other RNA
atctccagcctcagtgagaagttttagagctagaaatagcaagttaaaataaggctagtccgttatcaacttgaaaaagtggcaccgagtcggtgctttt

SEQ ID NO: 1459 - RNA, 100 nt, synthetic construct
  source 1..100: mol_type = other RNA
actgaggctggagatcacaggttttagagctagaaatagcaagttaaaataaggctagtccgttatcaacttgaaaaagtggcaccgagtcggtgctttt

SEQ ID NO: 1460 - RNA, 100 nt, synthetic construct
  source 1..100: mol_type = other RNA
acgctcacctgatgtccaaggttttagagctagaaatagcaagttaaaataaggctagtccgttatcaacttgaaaaagtggcaccgagtcggtgctttt

SEQ ID NO: 1461 - RNA, 100 nt, synthetic construct; identical to SEQ ID NO: 1460
  source 1..100: mol_type = other RNA

SEQ ID NO: 1462 - RNA, 100 nt, synthetic construct
  source 1..100: mol_type = other RNA
cctagggatatgtgggccacgttttagagctagaaatagcaagttaaaataaggctagtccgttatcaacttgaaaaagtggcaccgagtcggtgctttt

SEQ ID NO: 1463 - RNA, 100 nt, synthetic construct
  source 1..100: mol_type = other RNA
ctgaggctgcaaaggggcaagttttagagctagaaatagcaagttaaaataaggctagtccgttatcaacttgaaaaagtggcaccgagtcggtgctttt

SEQ ID NO: 1464 - RNA, 100 nt, synthetic construct
  source 1..100: mol_type = other RNA
gacaatctgtgaaacaaagcgttttagagctagaaatagcaagttaaaataaggctagtccgttatcaacttgaaaaagtggcaccgagtcggtgctttt

SEQ ID NO: 1465 - RNA, 100 nt, synthetic construct
  source 1..100: mol_type = other RNA
ccttttcaggctgagccagagttttagagctagaaatagcaagttaaaataaggctagtccgttatcaacttgaaaaagtggcaccgagtcggtgctttt

SEQ ID NO: 1466 - RNA, 100 nt, synthetic construct
  source 1..100: mol_type = other RNA
cttttcaggctgagccagacgttttagagctagaaatagcaagttaaaataaggctagtccgttatcaacttgaaaaagtggcaccgagtcggtgctttt

SEQ ID NO: 1467 - RNA, 100 nt, synthetic construct
  source 1..100: mol_type = other RNA
gacctggatcagacaggaccgttttagagctagaaatagcaagttaaaataaggctagtccgttatcaacttgaaaaagtggcaccgagtcggtgctttt

SEQ ID NO: 1468 - RNA, 100 nt, synthetic construct
  source 1..100: mol_type = other RNA
caacttactccacctggctggttttagagctagaaatagcaagttaaaataaggctagtccgttatcaacttgaaaaagtggcaccgagtcggtgctttt

SEQ ID NO: 1469 - RNA, 100 nt, synthetic construct; identical to SEQ ID NO: 1468
  source 1..100: mol_type = other RNA

SEQ ID NO: 1470 - RNA, 100 nt, synthetic construct
  source 1..100: mol_type = other RNA
cttacttcactgaggcctccgttttagagctagaaatagcaagttaaaataaggctagtccgttatcaacttgaaaaagtggcaccgagtcggtgctttt

SEQ ID NO: 1471 - RNA, 100 nt, synthetic construct; identical to SEQ ID NO: 1470
  source 1..100: mol_type = other RNA

SEQ ID NO: 1472 - RNA, 100 nt, synthetic construct
  source 1..100: mol_type = other RNA
gctcacccaaagccacagcggttttagagctagaaatagcaagttaaaataaggctagtccgttatcaacttgaaaaagtggcaccgagtcggtgctttt

SEQ ID NO: 1473 - RNA, 100 nt, synthetic construct; identical to SEQ ID NO: 1472
  source 1..100: mol_type = other RNA

SEQ ID NO: 1474 - RNA, 100 nt, synthetic construct
  source 1..100: mol_type = other RNA
gctcttacctgctacctccagttttagagctagaaatagcaagttaaaataaggctagtccgttatcaacttgaaaaagtggcaccgagtcggtgctttt

SEQ ID NO: 1475 - RNA, 100 nt, synthetic construct; identical to SEQ ID NO: 1474
  source 1..100: mol_type = other RNA

SEQ ID NO: 1476 - RNA, 100 nt, synthetic construct
  source 1..100: mol_type = other RNA
aaagacctggcaggcagaaggttttagagctagaaatagcaagttaaaataaggctagtccgttatcaacttgaaaaagtggcaccgagtcggtgctttt

SEQ ID NO: 1477 - RNA, 100 nt, synthetic construct
  source 1..100: mol_type = other RNA
gaaccaacactcgatcaccggttttagagctagaaatagcaagttaaaataaggctagtccgttatcaacttgaaaaagtggcaccgagtcggtgctttt

SEQ ID NO: 1478 - RNA, 100 nt, synthetic construct
  source 1..100: mol_type = other RNA
gctggcccatttcgcagagggttttagagctagaaatagcaagttaaaataaggctagtccgttatcaacttgaaaaagtggcaccgagtcggtgctttt

SEQ ID NO: 1479 - RNA, 100 nt, synthetic construct
  source 1..100: mol_type = other RNA
ctggcccatttcgcagaggcgttttagagctagaaatagcaagttaaaataaggctagtccgttatcaacttgaaaaagtggcaccgagtcggtgctttt

SEQ ID NO: 1480 - RNA, 100 nt, synthetic construct
  source 1..100: mol_type = other RNA
accacagccagagcctcagcgttttagagctagaaatagcaagttaaaataaggctagtccgttatcaacttgaaaaagtggcaccgagtcggtgctttt

SEQ ID NO: 1481 - RNA, 100 nt, synthetic construct
  source 1..100: mol_type = other RNA
actgggacaagatgctctgcgttttagagctagaaatagcaagttaaaataaggctagtccgttatcaacttgaaaaagtggcaccgagtcggtgctttt

SEQ ID NO: 1482 - RNA, 100 nt, synthetic construct
  source 1..100: mol_type = other RNA
cgtcgccactctagcccaaagttttagagctagaaatagcaagttaaaataaggctagtccgttatcaacttgaaaaagtggcaccgagtcggtgctttt

SEQ ID NO: 1483 - RNA, 100 nt, synthetic construct
  source 1..100: mol_type = other RNA
gcgacgccagcacctgggtagttttagagctagaaatagcaagttaaaataaggctagtccgttatcaacttgaaaaagtggcaccgagtcggtgctttt

SEQ ID NO: 1484 - RNA, 100 nt, synthetic construct
  source 1..100: mol_type = other RNA
cgacgccagcacctgggtaagttttagagctagaaatagcaagttaaaataaggctagtccgttatcaacttgaaaaagtggcaccgagtcggtgctttt

SEQ ID NO: 1485 - RNA, 100 nt, synthetic construct
  source 1..100: mol_type = other RNA
atcccaagcagcaaatgccagttttagagctagaaatagcaagttaaaataaggctagtccgttatcaacttgaaaaagtggcaccgagtcggtgctttt

SEQ ID NO: 1486 - RNA, 100 nt, synthetic construct
  source 1..100: mol_type = other RNA
acagttcaaccctttcaggagttttagagctagaaatagcaagttaaaataaggctagtccgttatcaacttgaaaaagtggcaccgagtcggtgctttt

SEQ ID NO: 1487 - RNA, 100 nt, synthetic construct
  source 1..100: mol_type = other RNA
ctttcaggagggcacctatcgttttagagctagaaatagcaagttaaaataaggctagtccgttatcaacttgaaaaagtggcaccgagtcggtgctttt

SEQ ID NO: 1488 - RNA, 100 nt, synthetic construct
  source 1..100: mol_type = other RNA
cctgcaaggacaggtcacccgttttagagctagaaatagcaagttaaaataaggctagtccgttatcaacttgaaaaagtggcaccgagtcggtgctttt

SEQ ID NO: 1489 - RNA, 100 nt, synthetic construct
  source 1..100: mol_type = other RNA
cgagagccacctctgcccctgttttagagctagaaatagcaagttaaaataaggctagtccgttatcaacttgaaaaagtggcaccgagtcggtgctttt

SEQ ID NO: 1490 - RNA, 100 nt, synthetic construct
  source 1..100: mol_type = other RNA
aactggcatggcccgagccagttttagagctagaaatagcaagttaaaataaggctagtccgttatcaacttgaaaaagtggcaccgagtcggtgctttt

SEQ ID NO: 1491 - RNA, 100 nt, synthetic construct
  source 1..100: mol_type = other RNA
cactcaccggttcctggggggttttagagctagaaatagcaagttaaaataaggctagtccgttatcaacttgaaaaagtggcaccgagtcggtgctttt

SEQ ID NO: 1492 - RNA, 100 nt, synthetic construct; identical to SEQ ID NO: 1491
  source 1..100: mol_type = other RNA

SEQ ID NO: 1493 - RNA, 100 nt, synthetic construct
  source 1..100: mol_type = other RNA
cgcaggggacgtcgtcgtgcgttttagagctagaaatagcaagttaaaataaggctagtccgttatcaacttgaaaaagtggcaccgagtcggtgctttt

SEQ ID NO: 1494 - RNA, 100 nt, synthetic construct
  source 1..100: mol_type = other RNA
cacactcacagtacacggtggttttagagctagaaatagcaagttaaaataaggctagtccgttatcaacttgaaaaagtggcaccgagtcggtgctttt

SEQ ID NO: 1495 - RNA, 100 nt, synthetic construct; identical to SEQ ID NO: 1494
  source 1..100: mol_type = other RNA

SEQ ID NO: 1496 - RNA, 100 nt, synthetic construct
  source 1..100: mol_type = other RNA
tggtcctgggagagacagaagttttagagctagaaatagcaagttaaaataaggctagtccgttatcaacttgaaaaagtggcaccgagtcggtgctttt

SEQ ID NO: 1497 - RNA, 100 nt, synthetic construct
  source 1..100: mol_type = other RNA
ttcctcacctttgacctggagttttagagctagaaatagcaagttaaaataaggctagtccgttatcaacttgaaaaagtggcaccgagtcggtgctttt

SEQ ID NO: 1498 - RNA, 100 nt, synthetic construct; identical to SEQ ID NO: 1497
  source 1..100: mol_type = other RNA

SEQ ID NO: 1499 - RNA, 100 nt, synthetic construct
  source 1..100: mol_type = other RNA
cctacaggtgcccaacatgggttttagagctagaaatagcaagttaaaataaggctagtccgttatcaacttgaaaaagtggcaccgagtcggtgctttt

SEQ ID NO: 1500 - RNA, 100 nt, synthetic construct
  source 1..100: mol_type = other RNA
tgtcacagctgacttgggcggttttagagctagaaatagcaagttaaaataaggctagtccgttatcaacttgaaaaagtggcaccgagtcggtgctttt

SEQ ID NO: 1501 - RNA, 100 nt, synthetic construct
  source 1..100: mol_type = other RNA
aacgcagggccccagctattgttttagagctagaaatagcaagttaaaataaggctagtccgttatcaacttgaaaaagtggcaccgagtcggtgctttt

SEQ ID NO: 1502 - RNA, 100 nt, synthetic construct
  source 1..100: mol_type = other RNA
cccgcagggcagcaggagcggttttagagctagaaatagcaagttaaaataaggctagtccgttatcaacttgaaaaagtggcaccgagtcggtgctttt

SEQ ID NO: 1503 - RNA, 100 nt, synthetic construct
  source 1..100: mol_type = other RNA
gagtgccaggtgatttgggcgttttagagctagaaatagcaagttaaaataaggctagtccgttatcaacttgaaaaagtggcaccgagtcggtgctttt

SEQ ID NO: 1504 - RNA, 100 nt, synthetic construct
  source 1..100: mol_type = other RNA
cggggccatggggctgggccgttttagagctagaaatagcaagttaaaataaggctagtccgttatcaacttgaaaaagtggcaccgagtcggtgctttt

SEQ ID NO: 1505 - RNA, 100 nt, synthetic construct
  source 1..100: mol_type = other RNA
tcaccagcagcagctcccgggttttagagctagaaatagcaagttaaaataaggctagtccgttatcaacttgaaaaagtggcaccgagtcggtgctttt

SEQ ID NO: 1506 - RNA, 100 nt, synthetic construct; identical to SEQ ID NO: 1505
  source 1..100: mol_type = other RNA

SEQ ID NO: 1507 - RNA, 100 nt, synthetic construct
  source 1..100: mol_type = other RNA
cactcaccagcagcagctccgttttagagctagaaatagcaagttaaaataaggctagtccgttatcaacttgaaaaagtggcaccgagtcggtgctttt

SEQ ID NO: 1508 - RNA, 100 nt, synthetic construct; identical to SEQ ID NO: 1507
  source 1..100: mol_type = other RNA

SEQ ID NO: 1509 - RNA, 100 nt, synthetic construct
  source 1..100: mol_type = other RNA
ggcaggcttgcattccctccgttttagagctagaaatagcaagttaaaataaggctagtccgttatcaacttgaaaaagtggcaccgagtcggtgctttt

SEQ ID NO: 1510 - RNA, 100 nt, synthetic construct; identical to SEQ ID NO: 1509
  source 1..100: mol_type = other RNA

SEQ ID NO: 1511 - RNA, 100 nt, synthetic construct
  source 1..100: mol_type = other RNA
cgtcggtacctgttctcctcgttttagagctagaaatagcaagttaaaataaggctagtccgttatcaacttgaaaaagtggcaccgagtcggtgctttt

SEQ ID NO: 1512 - RNA, 100 nt, synthetic construct; identical to SEQ ID NO: 1511
  source 1..100: mol_type = other RNA

SEQ ID NO: 1513 - RNA, 100 nt, synthetic construct
  source 1..100: mol_type = other RNA
ttcttctccagtgccccccagttttagagctagaaatagcaagttaaaataaggctagtccgttatcaacttgaaaaagtggcaccgagtcggtgctttt

SEQ ID NO: 1514 - RNA, 100 nt, synthetic construct
  source 1..100: mol_type = other RNA
taggctcaccagagggcacagttttagagctagaaatagcaagttaaaataaggctagtccgttatcaacttgaaaaagtggcaccgagtcggtgctttt

SEQ ID NO: 1515 - RNA, 100 nt, synthetic construct; identical to SEQ ID NO: 1514
  source 1..100: mol_type = other RNA

SEQ ID NO: 1516 - RNA, 100 nt, synthetic construct
  source 1..100: mol_type = other RNA
ctgtccattcctcagtctccgttttagagctagaaatagcaagttaaaataaggctagtccgttatcaacttgaaaaagtggcaccgagtcggtgctttt

SEQ ID NO: 1517 - RNA, 100 nt, synthetic construct
  source 1..100: mol_type = other RNA
tgtcccatgtcttatttcccgttttagagctagaaatagcaagttaaaataaggctagtccgttatcaacttgaaaaagtggcaccgagtcggtgctttt

SEQ ID NO: 1518 - RNA, 100 nt, synthetic construct
  source 1..100: mol_type = other RNA
cccgccttctaaatctccccgttttagagctagaaatagcaagttaaaataaggctagtccgttatcaacttgaaaaagtggcaccgagtcggtgctttt

SEQ ID NO: 1519 - RNA, 100 nt, synthetic construct
  source 1..100: mol_type = other RNA
ggaattttctcttccaagcggttttagagctagaaatagcaagttaaaataaggctagtccgttatcaacttgaaaaagtggcaccgagtcggtgctttt

SEQ ID NO: 1520 - RNA, 100 nt, synthetic construct
  source 1..100: mol_type = other RNA
aagagaaaattccagtgggcgttttagagctagaaatagcaagttaaaataaggctagtccgttatcaacttgaaaaagtggcaccgagtcggtgctttt

SEQ ID NO: 1521 - RNA, 100 nt, synthetic construct
  source 1..100: mol_type = other RNA
ggagagggcggggccacgctgttttagagctagaaatagcaagttaaaataaggctagtccgttatcaacttgaaaaagtggcaccgagtcggtgctttt

SEQ ID NO: 1522 - RNA, 100 nt, synthetic construct
  source 1..100: mol_type = other RNA
ccgccctctccgctcgtgatgttttagagctagaaatagcaagttaaaataaggctagtccgttatcaacttgaaaaagtggcaccgagtcggtgctttt

SEQ ID NO: 1523 - RNA, 100 nt, synthetic construct
  source 1..100: mol_type = other RNA
agggccaatcacgagcggaggttttagagctagaaatagcaagttaaaataaggctagtccgttatcaacttgaaaaagtggcaccgagtcggtgctttt

SEQ ID NO: 1524 - RNA, 100 nt, synthetic construct
  source 1..100: mol_type = other RNA
tcgtgattggccctaagttcgttttagagctagaaatagcaagttaaaataaggctagtccgttatcaacttgaaaaagtggcaccgagtcggtgctttt

SEQ ID NO: 1525 - RNA, 100 nt, synthetic construct
  source 1..100: mol_type = other RNA
aggggccatggggctgggccgttttagagctagaaatagcaagttaaaataaggctagtccgttatcaacttgaaaaagtggcaccgagtcggtgctttt

SEQ ID NO: 1526 - RNA, 100 nt, synthetic construct
  source 1..100: mol_type = other RNA
actcaccagcggcggctgccgttttagagctagaaatagcaagttaaaataaggctagtccgttatcaacttgaaaaagtggcaccgagtcggtgctttt

SEQ ID NO: 1527 - RNA, 100 nt, synthetic construct; identical to SEQ ID NO: 1526
  source 1..100: mol_type = other RNA

SEQ ID NO: 1528 - RNA, 100 nt, synthetic construct
  source 1..100: mol_type = other RNA
ctcaccagcggcggctgccggttttagagctagaaatagcaagttaaaataaggctagtccgttatcaacttgaaaaagtggcaccgagtcggtgctttt

SEQ ID NO: 1529 - RNA, 100 nt, synthetic construct; identical to SEQ ID NO: 1528
  source 1..100: mol_type = other RNA

SEQ ID NO: 1530 - RNA, 100 nt, synthetic construct
  source 1..100: mol_type = other RNA
cactcaccagcggcggctgcgttttagagctagaaatagcaagttaaaataaggctagtccgttatcaacttgaaaaagtggcaccgagtcggtgctttt

SEQ ID NO: 1531 - RNA, 100 nt, synthetic construct; identical to SEQ ID NO: 1530
  source 1..100: mol_type = other RNA

SEQ ID NO: 1532 - RNA, 100 nt, synthetic construct
  source 1..100: mol_type = other RNA
ctacagcgatatctgaaatcgttttagagctagaaatagcaagttaaaataaggctagtccgttatcaacttgaaaaagtggcaccgagtcggtgctttt

SEQ ID NO: 1533 - RNA, 100 nt, synthetic construct
  source 1..100: mol_type = other RNA
gtcggtacctgttctcctgagttttagagctagaaatagcaagttaaaataaggctagtccgttatcaacttgaaaaagtggcaccgagtcggtgctttt

SEQ ID NO: 1534 - RNA, 100 nt, synthetic construct; identical to SEQ ID NO: 1533
  source 1..100: mol_type = other RNA

SEQ ID NO: 1535 - RNA, 100 nt, synthetic construct
  source 1..100: mol_type = other RNA
caggctcaccagagggcacagttttagagctagaaatagcaagttaaaataaggctagtccgttatcaacttgaaaaagtggcaccgagtcggtgctttt

SEQ ID NO: 1536 - RNA, 100 nt, synthetic construct; identical to SEQ ID NO: 1535
  source 1..100: mol_type = other RNA

SEQ ID NO: 1537 - RNA, 100 nt, synthetic construct
  source 1..100: mol_type = other RNA
gaggcgcatggcggcgaggtgttttagagctagaaatagcaagttaaaataaggctagtccgttatcaacttgaaaaagtggcaccgagtcggtgctttt

SEQ ID NO: 1538 - RNA, 100 nt, synthetic construct; identical to SEQ ID NO: 1537
  source 1..100: mol_type = other RNA

SEQ ID NO: 1539 - RNA, 100 nt, synthetic construct
  source 1..100: mol_type = other RNA
cgcatggcggcgaggtgggggttttagagctagaaatagcaagttaaaataaggctagtccgttatcaacttgaaaaagtggcaccgagtcggtgctttt

SEQ ID NO: 1540 - RNA, 100 nt, synthetic construct; identical to SEQ ID NO: 1539
  source 1..100: mol_type = other RNA

SEQ ID NO: 1541 - RNA, 100 nt, synthetic construct
  source 1..100: mol_type = other RNA
aggcgcatggcggcgaggtggttttagagctagaaatagcaagttaaaataaggctagtccgttatcaacttgaaaaagtggcaccgagtcggtgctttt

SEQ ID NO: 1542 - RNA, 100 nt, synthetic construct; identical to SEQ ID NO: 1541
  source 1..100: mol_type = other RNA

SEQ ID NO: 1543 - RNA, 100 nt, synthetic construct
  source 1..100: mol_type = other RNA
ttcccacagggtaatgatgggttttagagctagaaatagcaagttaaaataaggctagtccgttatcaacttgaaaaagtggcaccgagtcggtgctttt

SEQ ID NO: 1544 - RNA, 100 nt, synthetic construct
  source 1..100: mol_type = other RNA
acgcctacaattggaaaacagttttagagctagaaatagcaagttaaaataaggctagtccgttatcaacttgaaaaagtggcaccgagtcggtgctttt

SEQ ID NO: 1545 - RNA, 100 nt, synthetic construct
  source 1..100: mol_type = other RNA
cgcctacaattggaaaacaagttttagagctagaaatagcaagttaaaataaggctagtccgttatcaacttgaaaaagtggcaccgagtcggtgctttt

SEQ ID NO: 1546 - RNA, 100 nt, synthetic construct
  source 1..100: mol_type = other RNA
caattgtaggcgtgatgggagttttagagctagaaatagcaagttaaaataaggctagtccgttatcaacttgaaaaagtggcaccgagtcggtgctttt

SEQ ID NO: 1547 - RNA, 100 nt, synthetic construct
  source 1..100: mol_type = other RNA
tgctgagctgttaataaaacgttttagagctagaaatagcaagttaaaataaggctagtccgttatcaacttgaaaaagtggcaccgagtcggtgctttt

SEQ ID NO: 1548 - RNA, 100 nt, synthetic construct
  source 1..100: mol_type = other RNA
acttaccctctgacttcatagttttagagctagaaatagcaagttaaaataaggctagtccgttatcaacttgaaaaagtggcaccgagtcggtgctttt

SEQ ID NO: 1549 - RNA, 100 nt, synthetic construct; identical to SEQ ID NO: 1548
  source 1..100: mol_type = other RNA

SEQ ID NO: 1550 - RNA, 100 nt, synthetic construct
  source 1..100: mol_type = other RNA
tcacttacttcatatttcttgttttagagctagaaatagcaagttaaaataaggctagtccgttatcaacttgaaaaagtggcaccgagtcggtgctttt

SEQ ID NO: 1551 - RNA, 100 nt, synthetic construct; identical to SEQ ID NO: 1550
  source 1..100: mol_type = other RNA

SEQ ID NO: 1552 - RNA, 119 nt, synthetic construct
  source 1..119: mol_type = other RNA
gttctgtcttttggtcaggacaaccgtctagctataagtgctgcagggtgtgagaaactcctattgctggacgatgtctcttacgaggcattagcaccattctttacgggccgcctcac

SEQ ID NO: 1553 - RNA, 119 nt, synthetic construct
  source 1..119: mol_type = other RNA
gttctgtcttttggtcaggacaaccgtctagctataagtgctgcagggtgtgagaaactcctattgctggacgatgtctcttacgaggcattagcactttacgggccgcctcactgact

SEQ ID NO: 1554 - RNA, 119 nt, synthetic construct
  source 1..119: mol_type = other RNA
gttctgtcttttggtcaggacaaccgtctagctataagtgctgcagggtgtgagaaactcctattgctggacgatgtctcttacgaggcattagcactacaagatggctcagccgatac

SEQ ID NO: 1555 - RNA, 119 nt, synthetic construct
  source 1..119: mol_type = other RNA
gttctgtcttttggtcaggacaaccgtctagctataagtgctgcagggtgtgagaaactcctattgctggacgatgtctcttacgaggcattagcactcaccatagccaggtctggggg

SEQ ID NO: 1556 - RNA, 119 nt, synthetic construct
  source 1..119: mol_type = other RNA
gttctgtcttttggtcaggacaaccgtctagctataagtgctgcagggtgtgagaaactcctattgctggacgatgtctcttacgaggcattagcactctgagtgagaatctgagctta

SEQ ID NO: 1557 - RNA, 119 nt, synthetic construct
  source 1..119: mol_type = other RNA
gttctgtcttttggtcaggacaaccgtctagctataagtgctgcagggtgtgagaaactcctattgctggacgatgtctcttacgaggcattagcactcactcagagaatcactcaggg

SEQ ID NO: 1558 - RNA, 119 nt, synthetic construct
  source 1..119: mol_type = other RNA
gttctgtcttttggtcaggacaaccgtctagctataagtgctgcagggtgtgagaaactcctattgctggacgatgtctcttacgaggcattagcacctgtggtacctggtgcgaggcc

SEQ ID NO: 1559 - RNA, 119 nt, synthetic construct
  source 1..119: mol_type = other RNA
gttctgtcttttggtcaggacaaccgtctagctataagtgctgcagggtgtgagaaactcctattgctggacgatgtctcttacgaggcattagcactcccaccttcttgggcagaagg

SEQ ID NO: 1560 - RNA, 119 nt, synthetic construct
  source 1..119: mol_type = other RNA
gttctgtcttttggtcaggacaaccgtctagctataagtgctgcagggtgtgagaaactcctattgctggacgatgtctcttacgaggcattagcacccgcacctgcacttccagcaac

SEQ ID NO: 1561 - RNA, 119 nt, synthetic construct
  source 1..119: mol_type = other RNA
gttctgtcttttggtcaggacaaccgtctagctataagtgctgcagggtgtgagaaactcctattgctggacgatgtctcttacgaggcattagcacaggctctgtcggccatgcctac

SEQ ID NO: 1562 - RNA, 119 nt, synthetic construct
  source 1..119: mol_type = other RNA
gttctgtcttttggtcaggacaaccgtctagctataagtgctgcagggtgtgagaaactcctattgctggacgatgtctcttacgaggcattagcacgtggggacactgctgctcccgc

SEQ ID NO: 1563 - RNA, 119 nt, synthetic construct
  source 1..119: mol_type = other RNA
gttctgtcttttggtcaggacaaccgtctagctataagtgctgcagggtgtgagaaactcctattgctggacgatgtctcttacgaggcattagcacatccctcactattctggtcgtg

SEQ ID NO: 1564 - RNA, 119 nt, synthetic construct
  source 1..119: mol_type = other RNA
gttctgtcttttggtcaggacaaccgtctagctataagtgctgcagggtgtgagaaactcctattgctggacgatgtctcttacgaggcattagcactggtcgtgtgattgacatcctg

SEQ ID NO: 1565 - RNA, 119 nt, synthetic construct
  source 1..119: mol_type = other RNA
gttctgtcttttggtcaggacaaccgtctagctataagtgctgcagggtgtgagaaactcctattgctggacgatgtctcttacgaggcattagcactgacccccatgcctttgccagt

SEQ ID NO: 1566 - RNA, 119 nt, synthetic construct
  source 1..119: mol_type = other RNA
gttctgtcttttggtcaggacaaccgtctagctataagtgctgcagggtgtgagaaactcctattgctggacgatgtctcttacgaggcattagcacgagacatggtgtaggtgaagca

SEQ ID NO: 1567 - RNA, 119 nt, synthetic construct
  source 1..119: mol_type = other RNA
gttctgtcttttggtcaggacaaccgtctagctataagtgctgcagggtgtgagaaactcctattgctggacgatgtctcttacgaggcattagcacaaaggaagccagttactcatca

SEQ ID NO: 1568 - RNA, 119 nt, synthetic construct
  source 1..119: mol_type = other RNA
gttctgtcttttggtcaggacaaccgtctagctataagtgctgcagggtgtgagaaactcctattgctggacgatgtctcttacgaggcattagcactgaagggcatgtgcagcagaga

SEQ ID NO: 1569 - RNA, 119 nt, synthetic construct
  source 1..119: mol_type = other RNA
gttctgtcttttggtcaggacaaccgtctagctataagtgctgcagggtgtgagaaactcctattgctggacgatgtctcttacgaggcattagcacttcaagggcctctttatagcga

SEQ ID NO: 1570 - RNA, 119 nt, synthetic construct
  source 1..119: mol_type = other RNA
gttctgtcttttggtcaggacaaccgtctagctataagtgctgcagggtgtgagaaactcctattgctggacgatgtctcttacgaggcattagcacggctgtcggtccatgtaggaga

SEQ ID NO: 1571 - RNA, 119 nt, synthetic construct
  source 1..119: mol_type = other RNA
gttctgtcttttggtcaggacaaccgtctagctataagtgctgcagggtgtgagaaactcctattgctggacgatgtctcttacgaggcattagcaccacaaccccctgcagagtggtg

SEQ ID NO: 1572 - RNA, 100 nt, synthetic construct
  source 1..100: mol_type = other RNA
tgacggccatcctcggcgtcgttttagagctagaaatagcaagttaaaataaggctagtccgttatcaacttgaaaaagtggcaccgagtcggtgctttt

SEQ ID NO: 1573 - RNA, 100 nt, synthetic construct
  source 1..100: mol_type = other RNA
gacggccatcctcggcgtctgttttagagctagaaatagcaagttaaaataaggctagtccgttatcaacttgaaaaagtggcaccgagtcggtgctttt

SEQ ID NO: 1574 - RNA, 100 nt, synthetic construct
  source 1..100: mol_type = other RNA
acggccatcctcggcgtctggttttagagctagaaatagcaagttaaaataaggctagtccgttatcaacttgaaaaagtggcaccgagtcggtgctttt

SEQ ID NO: 1575 - RNA, 100 nt, synthetic construct
  source 1..100: mol_type = other RNA
cgcactcacccgcccaggtcgttttagagctagaaatagcaagttaaaataaggctagtccgttatcaacttgaaaaagtggcaccgagtcggtgctttt

SEQ ID NO: 1576 - RNA, 100 nt, synthetic construct
  source 1..100: mol_type = other RNA
gcactcacccgcccaggtctgttttagagctagaaatagcaagttaaaataaggctagtccgttatcaacttgaaaaagtggcaccgagtcggtgctttt

SEQ ID NO: 1577 - RNA, 99 nt, synthetic construct
  source 1..99: mol_type = other RNA
cccaggctcgcactccatggttttagagctagaaatagcaagttaaaataaggctagtccgttatcaacttgaaaaagtggcaccgagtcggtgctttt

SEQ ID NO: 1578 - RNA, 100 nt, synthetic construct
  source 1..100: mol_type = other RNA
gtcactcaccggcctcgctcgttttagagctagaaatagcaagttaaaataaggctagtccgttatcaacttgaaaaagtggcaccgagtcggtgctttt

SEQ ID NO: 1579 - RNA, 100 nt, synthetic construct
  source 1..100: mol_type = other RNA
ccttaccccatctcagggtggttttagagctagaaatagcaagttaaaataaggctagtccgttatcaacttgaaaaagtggcaccgagtcggtgctttt

SEQ ID NO: 1580 - RNA, 100 nt, synthetic construct
  source 1..100: mol_type = other RNA
cttaccccatctcagggtgagttttagagctagaaatagcaagttaaaataaggctagtccgttatcaacttgaaaaagtggcaccgagtcggtgctttt

SEQ ID NO: 1581 - RNA, 100 nt, synthetic construct
  source 1..100: mol_type = other RNA
ggctctgggaaaagaggggagttttagagctagaaatagcaagttaaaataaggctagtccgttatcaacttgaaaaagtggcaccgagtcggtgctttt

SEQ ID NO: 1582 - RNA, 100 nt, synthetic construct
  source 1..100: mol_type = other RNA
cttcccacagatagaaaagggttttagagctagaaatagcaagttaaaataaggctagtccgttatcaacttgaaaaagtggcaccgagtcggtgctttt

SEQ ID NO: 1583 - RNA, 100 nt, synthetic construct
  source 1..100: mol_type = other RNA
ttcccacagatagaaaaggagttttagagctagaaatagcaagttaaaataaggctagtccgttatcaacttgaaaaagtggcaccgagtcggtgctttt

SEQ ID NO: 1584 - RNA, 100 nt, synthetic construct
  source 1..100: mol_type = other RNA
cccaggcagtgacagtgcccgttttagagctagaaatagcaagttaaaataaggctagtccgttatcaacttgaaaaagtggcaccgagtcggtgctttt

SEQ ID NO: 1585 - RNA, 100 nt, synthetic construct
  source 1..100: mol_type = other RNA
ccaggcagtgacagtgcccagttttagagctagaaatagcaagttaaaataaggctagtccgttatcaacttgaaaaagtggcaccgagtcggtgctttt

SEQ ID NO: 1586 - RNA, 100 nt, synthetic construct
  source 1..100: mol_type = other RNA
gacccgcatctcggcgtctggttttagagctagaaatagcaagttaaaataaggctagtccgttatcaacttgaaaaagtggcaccgagtcggtgctttt

SEQ ID NO: 1587 - RNA, 100 nt, synthetic construct
  source 1..100: mol_type = other RNA
gcactcaccggcccaggtctgttttagagctagaaatagcaagttaaaataaggctagtccgttatcaacttgaaaaagtggcaccgagtcggtgctttt

SEQ ID NO: 1588 - RNA, 100 nt, synthetic construct
  source 1..100: mol_type = other RNA
tgggagcctgggggcgaggagttttagagctagaaatagcaagttaaaataaggctagtccgttatcaacttgaaaaagtggcaccgagtcggtgctttt

SEQ ID NO: 1589 - RNA, 100 nt, synthetic construct
  source 1..100: mol_type = other RNA
gggagcctgggggcgaggaggttttagagctagaaatagcaagttaaaataaggctagtccgttatcaacttgaaaaagtggcaccgagtcggtgctttt

SEQ ID NO: 1590 - RNA, 100 nt, synthetic construct
  source 1..100: mol_type = other RNA
ccccaggctcccactccatggttttagagctagaaatagcaagttaaaataaggctagtccgttatcaacttgaaaaagtggcaccgagtcggtgctttt

SEQ ID NO: 1591 - RNA, 100 nt, synthetic construct
  source 1..100: mol_type = other RNA
ttaccccatctcagggtgaggttttagagctagaaatagcaagttaaaataaggctagtccgttatcaacttgaaaaagtggcaccgagtcggtgctttt

SEQ ID NO: 1592 - RNA, 100 nt, synthetic construct
  source 1..100: mol_type = other RNA
ttcccacaggtggaaaaggagttttagagctagaaatagcaagttaaaataaggctagtccgttatcaacttgaaaaagtggcaccgagtcggtgctttt

SEQ ID NO: 1593 - RNA, 100 nt, synthetic construct
  source 1..100: mol_type = other RNA
tgacccgcatctcggcgtctgttttagagctagaaatagcaagttaaaataaggctagtccgttatcaacttgaaaaagtggcaccgagtcggtgctttt

SEQ ID NO: 1594 - RNA, 100 nt, synthetic construct
  source 1..100: mol_type = other RNA
gcactcacaggcccaggtctgttttagagctagaaatagcaagttaaaataaggctagtccgttatcaacttgaaaaagtggcaccgagtcggtgctttt

SEQ ID NO: 1595 - RNA, 100 nt, synthetic construct
  source 1..100: mol_type = other RNA
cacaggcccaggtctcggtcgttttagagctagaaatagcaagttaaaataaggctagtccgttatcaacttgaaaaagtggcaccgagtcggtgctttt

SEQ ID NO: 1596 - RNA, 100 nt, synthetic construct
  source 1..100: mol_type = other RNA
agaccctggccccgcccccggttttagagctagaaatagcaagttaaaataaggctagtccgttatcaacttgaaaaagtggcaccgagtcggtgctttt

SEQ ID NO: 1597 - RNA, 100 nt, synthetic construct
  source 1..100: mol_type = other RNA
ggctctgggaaaggaggggagttttagagctagaaatagcaagttaaaataaggctagtccgttatcaacttgaaaaagtggcaccgagtcggtgctttt

SEQ ID NO: 1598 - RNA, 100 nt, synthetic construct
  source 1..100: mol_type = other RNA
cccagccagcaacagtgcccgttttagagctagaaatagcaagttaaaataaggctagtccgttatcaacttgaaaaagtggcaccgagtcggtgctttt

SEQ ID NO: 1599 - RNA, 119 nt, synthetic construct
  source 1..119: mol_type = other RNA
gttctgtcttttggtcaggacaaccgtctagctataagtgctgcagggtgtgagaaactcctattgctggacgatgtctcttacgaggcattagcacggaccgggagacacagaagtac

SEQ ID NO: 1600 - RNA, 119 nt, synthetic construct
  source 1..119: mol_type = other RNA
gttctgtcttttggtcaggacaaccgtctagctataagtgctgcagggtgtgagaaactcctattgctggacgatgtctcttacgaggcattagcaccatcgccctgaacgaggacctg

SEQ ID NO: 1601 - RNA, 119 nt, synthetic construct
  source 1..119: mol_type = other RNA
gttctgtcttttggtcaggacaaccgtctagctataagtgctgcagggtgtgagaaactcctattgctggacgatgtctcttacgaggcattagcaccatcgccctgaacgaggatctg

SEQ ID NO: 1602 - RNA, 119 nt, synthetic construct
  source 1..119: mol_type = other RNA
gttctgtcttttggtcaggacaaccgtctagctataagtgctgcagggtgtgagaaactcctattgctggacgatgtctcttacgaggcattagcacttgctggcctggctgtcctagc

SEQ ID NO: 1603 - RNA, 119 nt, synthetic construct; identical to SEQ ID NO: 1600
  source 1..119: mol_type = other RNA

SEQ ID NO: 1604 - RNA, 100 nt, synthetic construct
  source 1..100: mol_type = other RNA
cgggccatggagggcccggggttttagagctagaaatagcaagttaaaataaggctagtccgttatcaacttgaaaaagtggcaccgagtcggtgctttt

SEQ ID NO: 1605 - RNA, 100 nt, synthetic construct
  source 1..100: mol_type = other RNA
gggccatggagggcccgggagttttagagctagaaatagcaagttaaaataaggctagtccgttatcaacttgaaaaagtggcaccgagtcggtgctttt

SEQ ID NO: 1606 - RNA, 100 nt, synthetic construct
  source 1..100: mol_type = other RNA
ggccatggagggcccgggaggttttagagctagaaatagcaagttaaaataaggctagtccgttatcaacttgaaaaagtggcaccgagtcggtgctttt

SEQ ID NO: 1607 - RNA, 100 nt, synthetic construct
  source 1..100: mol_type = other RNA
ctcacctatgactctgagccgttttagagctagaaatagcaagttaaaataaggctagtccgttatcaacttgaaaaagtggcaccgagtcggtgctttt

SEQ ID NO: 1608 - RNA, 100 nt, synthetic construct
  source 1..100: mol_type = other RNA
ttggctggggagaggaggaggttttagagctagaaatagcaagttaaaataaggctagtccgttatcaacttgaaaaagtggcaccgagtcggtgctttt

SEQ ID NO: 1609 - RNA, 100 nt, synthetic construct
  source 1..100: mol_type = other RNA
tggctggggagaggaggagagttttagagctagaaatagcaagttaaaataaggctagtccgttatcaacttgaaaaagtggcaccgagtcggtgctttt

SEQ ID NO: 1610 - RNA, 100 nt, synthetic construct
  source 1..100: mol_type = other RNA
tacactcacagcgtacagaggttttagagctagaaatagcaagttaaaataaggctagtccgttatcaacttgaaaaagtggcaccgagtcggtgctttt

SEQ ID NO: 1611 - RNA, 100 nt, synthetic construct
  source 1..100: mol_type = other RNA
acactcacagcgtacagagagttttagagctagaaatagcaagttaaaataaggctagtccgttatcaacttgaaaaagtggcaccgagtcggtgctttt

SEQ ID NO: 1612 - RNA, 100 nt, synthetic construct
  source 1..100: mol_type = other RNA
ggagggtctgggggaaatgggttttagagctagaaatagcaagttaaaataaggctagtccgttatcaacttgaaaaagtggcaccgagtcggtgctttt

SEQ ID NO: 1613 - RNA, 100 nt, synthetic construct
  source 1..100: mol_type = other RNA
gagggtctgggggaaatggggttttagagctagaaatagcaagttaaaataaggctagtccgttatcaacttgaaaaagtggcaccgagtcggtgctttt

SEQ ID NO: 1614 - RNA, 100 nt, synthetic construct
  source 1..100: mol_type = other RNA
caggctgtggggtaggaggtgttttagagctagaaatagcaagttaaaataaggctagtccgttatcaacttgaaaaagtggcaccgagtcggtgctttt

SEQ ID NO: 1615 - RNA, 100 nt, synthetic construct
  source 1..100: mol_type = other RNA
gggctgtagtgggagagggggttttagagctagaaatagcaagttaaaataaggctagtccgttatcaacttgaaaaagtggcaccgagtcggtgctttt

SEQ ID NO: 1616 - RNA, 100 nt, synthetic construct
  source 1..100: mol_type = other RNA
ggagggctgtagtgggagaggttttagagctagaaatagcaagttaaaataaggctagtccgttatcaacttgaaaaagtggcaccgagtcggtgctttt

SEQ ID NO: 1617 - RNA, 100 nt, synthetic construct
  source 1..100: mol_type = other RNA
tcctacctgctcagtgcatggttttagagctagaaatagcaagttaaaataaggctagtccgttatcaacttgaaaaagtggcaccgagtcggtgctttt

SEQ ID NO: 1618 - RNA, 100 nt, synthetic construct
  source 1..100: mol_type = other RNA
catttcctggaggtagagaggttttagagctagaaatagcaagttaaaataaggctagtccgttatcaacttgaaaaagtggcaccgagtcggtgctttt

SEQ ID NO: 1619 - RNA, 100 nt, synthetic construct; identical to SEQ ID NO: 673
  source 1..100: mol_type = other RNA

SEQ ID NO: 1620 - RNA, 100 nt, synthetic construct; identical to SEQ ID NO: 674
  source 1..100: mol_type = other RNA

SEQ ID NO: 1621 - RNA, 100 nt, synthetic construct; identical to SEQ ID NO: 675
  source 1..100: mol_type = other RNA

SEQ ID NO: 1622 - RNA, 100 nt, synthetic construct
  source 1..100: mol_type = other RNA
accgcccagacccggagcaggttttagagctagaaatagcaagttaaaataaggctagtccgttatcaacttgaaaaagtggcaccgagtcggtgctttt

SEQ ID NO: 1623 - RNA, 100 nt, synthetic construct
  source 1..100: mol_type = other RNA
gcggggtctgagtgtagagagttttagagctagaaatagcaagttaaaataaggctagtccgttatcaacttgaaaaagtggcaccgagtcggtgctttt

SEQ ID NO: 1624 - RNA, 100 nt, synthetic construct
  source 1..100: mol_type = other RNA
gaggtccagggtctcaggtcgttttagagctagaaatagcaagttaaaataaggctagtccgttatcaacttgaaaaagtggcaccgagtcggtgctttt

SEQ ID NO: 1625 - RNA, 100 nt, synthetic construct
  source 1..100: mol_type = other RNA
gtagaatccagtcagtgagggttttagagctagaaatagcaagttaaaataaggctagtccgttatcaacttgaaaaagtggcaccgagtcggtgctttt

SEQ ID NO: 1626 - RNA, 100 nt, synthetic construct; identical to SEQ ID NO: 1477
  source 1..100: mol_type = other RNA

SEQ ID NO: 1627 - RNA, 100 nt, synthetic construct
  source 1..100: mol_type = other RNA
aggtccagggtctcaggtcagttttagagctagaaatagcaagttaaaataaggctagtccgttatcaacttgaaaaagtggcaccgagtcggtgctttt

SEQ ID NO: 1628 - RNA, 100 nt, synthetic construct; identical to SEQ ID NO: 1472
  source 1..100: mol_type = other RNA

SEQ ID NO: 1629 - RNA, 100 nt, synthetic construct; identical to SEQ ID NO: 1400
  source 1..100: mol_type = other RNA

SEQ ID NO: 1630 - RNA, 100 nt, synthetic construct
  source 1..100: mol_type = other RNA
aagccagttactcatcaggggttttagagctagaaatagcaagttaaaataaggctagtccgttatcaacttgaaaaagtggcaccgagtcggtgctttt

SEQ ID NO: 1631 - RNA, 100 nt, synthetic construct; identical to SEQ ID NO: 500
  source 1..100: mol_type = other RNA

SEQ ID NO: 1632 - RNA, 100 nt, synthetic construct
  source 1..100: mol_type = other RNA
tgttccgagagctgatctcagttttagagctagaaatagcaagttaaaataaggctagtccgttatcaacttgaaaaagtggcaccgagtcggtgctttt

SEQ ID NO: 1633 - RNA, 100 nt, synthetic construct
  source 1..100: mol_type = other RNA
cccctggagaaagagaagaggttttagagctagaaatagcaagttaaaataaggctagtccgttatcaacttgaaaaagtggcaccgagtcggtgctttt

SEQ ID NO: 1634 - RNA, 100 nt, synthetic construct
  source 1..100: mol_type = other RNA
ccctccaggctgccttcagggttttagagctagaaatagcaagttaaaataaggctagtccgttatcaacttgaaaaagtggcaccgagtcggtgctttt

SEQ ID NO: 1635 - RNA, 100 nt, synthetic construct; identical to SEQ ID NO: 1364
  source 1..100: mol_type = other RNA

SEQ ID NO: 1636 - RNA, 100 nt, synthetic construct
  source 1..100: mol_type = other RNA
ttccgagagctgatctcatggttttagagctagaaatagcaagttaaaataaggctagtccgttatcaacttgaaaaagtggcaccgagtcggtgctttt

SEQ ID NO: 1637 - RNA, 100 nt, synthetic construct; identical to SEQ ID NO: 660
  source 1..100: mol_type = other RNA

SEQ ID NO: 1638 - RNA, 100 nt, synthetic construct
  source 1..100: mol_type = other RNA
gcacctgtccccctgtgggcgttttagagctagaaatagcaagttaaaataaggctagtccgttatcaacttgaaaaagtggcaccgagtcggtgctttt

SEQ ID NO: 1639 - RNA, 100 nt, synthetic construct
  source 1..100: mol_type = other RNA
ctccccatgagatcagctctgttttagagctagaaatagcaagttaaaataaggctagtccgttatcaacttgaaaaagtggcaccgagtcggtgctttt

SEQ ID NO: 1640 - RNA, 100 nt, synthetic construct
  source 1..100: mol_type = other RNA
ggactctccgcgccccggtggttttagagctagaaatagcaagttaaaataaggctagtccgttatcaacttgaaaaagtggcaccgagtcggtgctttt

SEQ ID NO: 1641 - RNA, 100 nt, synthetic construct
  source 1..100: mol_type = other RNA
tggcccatttcgcagaggcggttttagagctagaaatagcaagttaaaataaggctagtccgttatcaacttgaaaaagtggcaccgagtcggtgctttt

SEQ ID NO: 1642 - RNA, 100 nt, synthetic construct
  source 1..100: mol_type = other RNA
ggatttgcctagcttccccagttttagagctagaaatagcaagttaaaataaggctagtccgttatcaacttgaaaaagtggcaccgagtcggtgctttt

SEQ ID NO: 1643 - RNA, 100 nt, synthetic construct; identical to SEQ ID NO: 1479
  source 1..100: mol_type = other RNA

SEQ ID NO: 1644 - RNA, 100 nt, synthetic construct; identical to SEQ ID NO: 651
  source 1..100: mol_type = other RNA

SEQ ID NO: 1645 - RNA, 100 nt, synthetic construct
  source 1..100: mol_type = other RNA
gacccagaagccaactatgggttttagagctagaaatagcaagttaaaataaggctagtccgttatcaacttgaaaaagtggcaccgagtcggtgctttt

SEQ ID NO: 1646 - RNA, 100 nt, synthetic construct
  source 1..100: mol_type = other RNA
ttgtgccacagggctgctgcgttttagagctagaaatagcaagttaaaataaggctagtccgttatcaacttgaaaaagtggcaccgagtcggtgctttt

SEQ ID NO: 1647 - RNA, 100 nt, synthetic construct; identical to SEQ ID NO: 1358
  source 1..100: mol_type = other RNA

SEQ ID NO: 1648 - RNA, 100 nt, synthetic construct; identical to SEQ ID NO: 1367
  source 1..100: mol_type = other RNA

SEQ ID NO: 1649 - RNA, 20 nt, synthetic construct
  source 1..20: mol_type = other RNA
ctcgatgcgaggactctcca

SEQ ID NO: 1650 - RNA, 20 nt, synthetic construct
  source 1..20: mol_type = other RNA
tctcgatgcgaggactctcc

SEQ ID NO: 1651 - RNA, 20 nt, synthetic construct
  source 1..20: mol_type = other RNA
catcgagataacctcgtgct

SEQ ID NO: 1652 - RNA, 20 nt, synthetic construct
  source 1..20: mol_type = other RNA
tggccgggctcaggcacgag

SEQ ID NO: 1653 - RNA, 20 nt, synthetic construct
  source 1..20: mol_type = other RNA
gcccactggtaggggtgctg

SEQ ID NO: 1654 - RNA, 20 nt, synthetic construct
  source 1..20: mol_type = other RNA
tgggctcggtggtgggactt

SEQ ID NO: 1655 - RNA, 20 nt, synthetic construct
  source 1..20: mol_type = other RNA
cgagcccactacgagacgga

SEQ ID NO: 1656 - RNA, 20 nt, synthetic construct
  source 1..20: mol_type = other RNA
ctcgtagtgggctcggtggt

SEQ ID NO: 1657 - RNA, 20 nt, synthetic construct
  source 1..20: mol_type = other RNA
gccgtgaaggcgtcggccgg

SEQ ID NO: 1658 - RNA, 20 nt, synthetic construct
  source 1..20: mol_type = other RNA
gtttctgagtttcaggattc

SEQ ID NO: 1659 - RNA, 20 nt, synthetic construct
  source 1..20: mol_type = other RNA
catcgggaggaagaacacac

SEQ ID NO: 1660 - RNA, 20 nt, synthetic construct
  source 1..20: mol_type = other RNA
ggaggaagaacacacgggta

SEQ ID NO: 1661 - RNA, 20 nt, synthetic construct
  source 1..20: mol_type = other RNA
gagcgctgggctgcatcaga

SEQ ID NO: 1662 - RNA, 20 nt, synthetic construct
  source 1..20: mol_type = other RNA
tgatctcgatccgagggctc

SEQ ID NO: 1663 - RNA, 20 nt, synthetic construct
  source 1..20: mol_type = other RNA
acggagtgatctcgatccga

SEQ ID NO: 1664 - RNA, 20 nt, synthetic construct
  source 1..20: mol_type = other RNA
gcggaggcattcgtgcgccg

SEQ ID NO: 1665 - RNA, 20 nt, synthetic construct
  source 1..20: mol_type = other RNA
gccgcgctcagaaacttctg

SEQ ID NO: 1666 - RNA, 20 nt, synthetic construct
  source 1..20: mol_type = other RNA
gggcctcgggcctgagccct

SEQ ID NO: 1667 - RNA, 20 nt, synthetic construct
  source 1..20: mol_type = other RNA
cctcgggctggcggccaccc

SEQ ID NO: 1668 - RNA, 20 nt, synthetic construct
  source 1..20: mol_type = other RNA
ccactcgcccgtgccccgtc

SEQ ID NO: 1669 - RNA, 20 nt, synthetic construct
  source 1..20: mol_type = other RNA
gcattcgtgcgccgaggcct

SEQ ID NO: 1670 - RNA, 20 nt, synthetic construct
  source 1..20: mol_type = other RNA
gagcctcaccccagcgctcc

SEQ ID NO: 1671 - RNA, 20 nt, synthetic construct
  source 1..20: mol_type = other RNA
gaggggctccgggagcgctg

SEQ ID NO: 1672 - RNA, 20 nt, synthetic construct
  source 1..20: mol_type = other RNA
agggctggtcttccacatct

SEQ ID NO: 1673 - RNA, 20 nt, synthetic construct
  source 1..20: mol_type = other RNA
gcggggagcccaggccaaag

SEQ ID NO: 1674 - RNA, 20 nt, synthetic construct
  source 1..20: mol_type = other RNA
gccaccatgaagaccttttg

SEQ ID NO: 1675 - RNA, 20 nt, synthetic construct
  source 1..20: mol_type = other RNA
ttgcggcacacctgagtacc

SEQ ID NO: 1676 - RNA, 20 nt, synthetic construct
  source 1..20: mol_type = other RNA
gtaggagaactgggggaagt

SEQ ID NO: 1677 - RNA, 20 nt, synthetic construct
  source 1..20: mol_type = other RNA
ctcctactcggccagcggca

SEQ ID NO: 1678 - RNA, 20 nt, synthetic construct
  source 1..20: mol_type = other RNA
gaaaaccttctgtgggaccc

SEQ ID NO: 1679 - RNA, 20 nt, synthetic construct
  source 1..20: mol_type = other RNA
agtaggagaactgggggaag

SEQ ID NO: 1680 - RNA, 20 nt, synthetic construct
  source 1..20: mol_type = other RNA
gttgcaagtctgacatttga

SEQ ID NO: 1681 - RNA, 20 nt, synthetic construct
  source 1..20: mol_type = other RNA
gaaacactacctggtacaca

SEQ ID NO: 1682 - RNA, 20 nt, synthetic construct
  source 1..20: mol_type = other RNA
tgtggcagacctacagtgta

SEQ ID NO: 1683 - RNA, 20 nt, synthetic construct
  source 1..20: mol_type = other RNA
gggcacaccttgcattggta

SEQ ID NO: 1684 - RNA, 20 nt, synthetic construct
  source 1..20: mol_type = other RNA
ctgcgcacctggcattcatg

SEQ ID NO: 1685 - RNA, 20 nt, synthetic construct
  source 1..20: mol_type = other RNA
cctaccggtccgcaagcgtc

SEQ ID NO: 1686 - RNA, 20 nt, synthetic construct
  source 1..20: mol_type = other RNA
actcacacatctggataggt

SEQ ID NO: 1687 - RNA, 20 nt, synthetic construct
  source 1..20: mol_type = other RNA
gacttacctagaccttcctg

SEQ ID NO: 1688 - RNA, 20 nt, synthetic construct
  source 1..20: mol_type = other RNA
aatcttacagagctgaaaag

SEQ ID NO: 1689 - RNA, 20 nt, synthetic construct
  source 1..20: mol_type = other RNA
catcatattcttcacttcca

SEQ ID NO: 1690 - RNA, 20 nt, synthetic construct
  source 1..20: mol_type = other RNA
aagaatatgatgttcctccc

SEQ ID NO: 1691 - RNA, 20 nt, synthetic construct
  source 1..20: mol_type = other RNA
cccctaaaccacgaccgcgc

SEQ ID NO: 1692 - RNA, 20 nt, synthetic construct
  source 1..20: mol_type = other RNA
tcctgcgcggtcgtggttta

SEQ ID NO: 1693 - RNA, 20 nt, synthetic construct
  source 1..20: mol_type = other RNA
ccctactctgtgaccaactg

SEQ ID NO: 1694 - RNA, 20 nt, synthetic construct
  source 1..20: mol_type = other RNA
cgcaggcgcgtcttccaggt

SEQ ID NO: 1695 - RNA, 20 nt, synthetic construct
  source 1..20: mol_type = other RNA
gcaccgcaggcgcgtcttcc

SEQ ID NO: 1696 - RNA, 20 nt, synthetic construct
  source 1..20: mol_type = other RNA
gaacaagagcaatgactttg

SEQ ID NO: 1697 - RNA, 20 nt, synthetic construct
  source 1..20: mol_type = other RNA
cacctacctaagaaccatcc

SEQ ID NO: 1698 - RNA, 20 nt, synthetic construct
  source 1..20: mol_type = other RNA
ggggttccagggcctgtctg

SEQ ID NO: 1699 - RNA, 20 nt, synthetic construct
  source 1..20: mol_type = other RNA
gacttgcacaacatgcagaa

SEQ ID NO: 1700 - RNA, 20 nt, synthetic construct
  source 1..20: mol_type = other RNA
ttgccagaagcaagatccca

SEQ ID NO: 1701 - RNA, 20 nt, synthetic construct
  source 1..20: mol_type = other RNA
ccatgaacaaccaaaagaga

SEQ ID NO: 1702 - RNA, 20 nt, synthetic construct
  source 1..20: mol_type = other RNA
tcacccccatccagaagccg

SEQ ID NO: 1703 - RNA, 20 nt, synthetic construct
  source 1..20: mol_type = other RNA
atctggctggtctcgtccag

SEQ ID NO: 1704 - RNA, 20 nt, synthetic construct
  source 1..20: mol_type = other RNA
gatgagcgacctcccggtga

SEQ ID NO: 1705 - RNA, 20 nt, synthetic construct
  source 1..20: mol_type = other RNA
agacagcgatgacgtctctg

SEQ ID NO: 1706 - RNA, 20 nt, synthetic construct
  source 1..20: mol_type = other RNA
acgtctctgaggtggacgcg

SEQ ID NO: 1707 - RNA, 20 nt, synthetic construct
  source 1..20: mol_type = other RNA
ttaggggagagtttctcggc

SEQ ID NO: 1708 - RNA, 20 nt, synthetic construct
  source 1..20: mol_type = other RNA
ggagagtgaggaggaggaag

SEQ ID NO: 1709 - RNA, 20 nt, synthetic construct
  source 1..20: mol_type = other RNA
aaggctccgaatccgaatct

SEQ ID NO: 1710 - RNA, 20 nt, synthetic construct
  source 1..20: mol_type = other RNA
atcgtcactcacgaccggct

SEQ ID NO: 1711 - RNA, 20 nt, synthetic construct
  source 1..20: mol_type = other RNA
tgacagtgaggaggaacaag

SEQ ID NO: 1712 - RNA, 20 nt, synthetic construct
  source 1..20: mol_type = other RNA
cacccgtggttgttacactc

SEQ ID NO: 1713 - RNA, 20 nt, synthetic construct
  source 1..20: mol_type = other RNA
catcagccaggccccgcagg

SEQ ID NO: 1714 - RNA, 20 nt, synthetic construct
  source 1..20: mol_type = other RNA
ggtgtatccatctgagttga

SEQ ID NO: 1715 - RNA, 20 nt, synthetic construct
  source 1..20: mol_type = other RNA
gggtgtatccatctgagttg

SEQ ID NO: 1716 - RNA, 20 nt, synthetic construct
  source 1..20: mol_type = other RNA
gcgcaagaagcagatcgacg

SEQ ID NO: 1717 - RNA, 20 nt, synthetic construct
  source 1..20: mol_type = other RNA
ttactacagcctggccagca

SEQ ID NO: 1718 - RNA, 20 nt, synthetic construct
  source 1..20: mol_type = other RNA
actcacccagcatccccagc

SEQ ID NO: 1719 - RNA, 20 nt, synthetic construct
  source 1..20: mol_type = other RNA
agcgactgcagaaagaagag

SEQ ID NO: 1720 - RNA, 20 nt, synthetic construct
  source 1..20: mol_type = other RNA
cataccagctgagccgtccg

SEQ ID NO: 1721 - RNA, 20 nt, synthetic construct
  source 1..20: mol_type = other RNA
tggaaatctgggggtcagaa

SEQ ID NO: 1722 - RNA, 20 nt, synthetic construct
  source 1..20: mol_type = other RNA
gttacccacctaagcaggtc

SEQ ID NO: 1723 - RNA, 20 nt, synthetic construct
  source 1..20: mol_type = other RNA
ctgccagcggctgaactgtg

SEQ ID NO: 1724 - RNA, 20 nt, synthetic construct
  source 1..20: mol_type = other RNA
cctcccactgcttggagctc

SEQ ID NO: 1725 - RNA, 20 nt, synthetic construct
  source 1..20: mol_type = other RNA
tctgccagcggctgaactgt

SEQ ID NO: 1726 - RNA, 20 nt, synthetic construct
  source 1..20: mol_type = other RNA
gtctgccagcggctgaactg

SEQ ID NO: 1727 - RNA, 20 nt, synthetic construct
  source 1..20: mol_type = other RNA
gaagtgccagggccagctgg

SEQ ID NO: 1728 - RNA, 20 nt, synthetic construct
  source 1..20: mol_type = other RNA
ccatgtgccatccgtccttg

SEQ ID NO: 1729 - RNA, 20 nt, synthetic construct
  source 1..20: mol_type = other RNA
tttgcagccagagctggggc

SEQ ID NO: 1730 - RNA, 20 nt, synthetic construct
  source 1..20: mol_type = other RNA
ggttctgcaatgagacactc

SEQ ID NO: 1731 - RNA, 20 nt, synthetic construct
  source 1..20: mol_type = other RNA
gagctaggagaggagagagc

SEQ ID NO: 1732 - RNA, 20 nt, synthetic construct
  source 1..20: mol_type = other RNA
tcacttacctgagcaaagga

SEQ ID NO: 1733 - RNA, 20 nt, synthetic construct
  source 1..20: mol_type = other RNA
ctcacttacctgagcaaagg

SEQ ID NO: 1734 - RNA, 20 nt, synthetic construct
  source 1..20: mol_type = other RNA
ctgcagctggtggcacagtc

SEQ ID NO: 1735 - RNA, 20 nt, synthetic construct
  source 1..20: mol_type = other RNA
cggccagcactgtgccggcg

SEQ ID NO: 1736 - RNA, 20 nt, synthetic construct
  source 1..20: mol_type = other RNA
atcttccattggattggcaa

SEQ ID NO: 1737 - RNA, 20 nt, synthetic construct
  source 1..20: mol_type = other RNA
gatcttccattggattggca

SEQ ID NO: 1738 - RNA, 20 nt, synthetic construct
  source 1..20: mol_type = other RNA
aacctgagaggggaagcaat

SEQ ID NO: 1739 - RNA, 20 nt, synthetic construct
  source 1..20: mol_type = other RNA
aaacctgagaggggaagcaa

SEQ ID NO: 1740 - RNA, 20 nt, synthetic construct
  source 1..20: mol_type = other RNA
gtgcagagccgtctggtggg

SEQ ID NO: 1741 - RNA, 20 nt, synthetic construct
  source 1..20: mol_type = other RNA
ctcccaccgcagcgagctcc

SEQ ID NO: 1742 - RNA, 20 nt, synthetic construct
  source 1..20: mol_type = other RNA
ctcccaaagttcgtggcact

SEQ ID NO: 1743 - RNA, 20 nt, synthetic construct
  source 1..20: mol_type = other RNA
aggtgcagagccgtctggtg

SEQ ID NO: 1744 - RNA, 20 nt, synthetic construct
  source 1..20: mol_type = other RNA
ggtgcagagccgtctggtgg

SEQ ID NO: 1745 - RNA, 20 nt, synthetic construct
  source 1..20: mol_type = other RNA
tctcccaaagttcgtggcac

SEQ ID NO: 1746 - RNA, 20 nt, synthetic construct
  source 1..20: mol_type = other RNA
tgtcccagtgccacgaactt

SEQ ID NO: 1747 - RNA, 20 nt, synthetic construct
  source 1..20: mol_type = other RNA
aaggtgcagagccgtctggt

SEQ ID NO: 1748 - RNA, 20 nt, synthetic construct
  source 1..20: mol_type = other RNA
tcctatcgagtgctggacgc

SEQ ID NO: 1749 - RNA, 20 nt, synthetic construct
  source 1..20: mol_type = other RNA
caaggtgcagagccgtctgg

SEQ ID NO: 1750 - RNA, 20 nt, synthetic construct
  source 1..20: mol_type = other RNA
ggtgcgccagggggctcagt

SEQ ID NO: 1751 - RNA, 20 nt, synthetic construct
  source 1..20: mol_type = other RNA
gggctgcccactgagccccc

SEQ ID NO: 1752 - RNA, 20 nt, synthetic construct
  source 1..20: mol_type = other RNA
aggtgcgccagggggctcag

SEQ ID NO: 1753 - RNA, 20 nt, synthetic construct
  source 1..20: mol_type = other RNA
ggccaggatccaaaccccgc

SEQ ID NO: 1754 - RNA, 20 nt, synthetic construct
  source 1..20: mol_type = other RNA
cgccagtggattggcccaac

SEQ ID NO: 1755 - RNA, 20 nt, synthetic construct
  source 1..20: mol_type = other RNA
aagaagcagcgccagtggat

SEQ ID NO: 1756 - RNA, 20 nt, synthetic construct
  source 1..20: mol_type = other RNA
aaagacactgggcagatggt

SEQ ID NO: 1757 - RNA, 20 nt, synthetic construct
  source 1..20: mol_type = other RNA
gcttacctggataagctgac

SEQ ID NO: 1758 - RNA, 20 nt, synthetic construct
  source 1..20: mol_type = other RNA
ttccagagctggggaaagaa

SEQ ID NO: 1759 - RNA, 20 nt, synthetic construct
  source 1..20: mol_type = other RNA
atggggctcagaggctgtaa

SEQ ID NO: 1760 - RNA, 20 nt, synthetic construct
  source 1..20: mol_type = other RNA
cttgggtcaggacatcaact

SEQ ID NO: 1761 - RNA, 20 nt, synthetic construct
  source 1..20: mol_type = other RNA
cgatgatcaggatatctaca

SEQ ID NO: 1762 - RNA, 20 nt, synthetic construct
  source 1..20: mol_type = other RNA
cacgcacctggacagctgac

SEQ ID NO: 1763 - RNA, 20 nt, synthetic construct
  source 1..20: mol_type = other RNA
aaacagaggagtcggagaaa

SEQ ID NO: 1764 - RNA, 20 nt, synthetic construct
  source 1..20: mol_type = other RNA
acacaagttcaccagcagaa

SEQ ID NO: 1765 - RNA, 20 nt, synthetic construct
  source 1..20: mol_type = other RNA
gttcagccaaaacctcccca

SEQ ID NO: 1766 - RNA, 20 nt, synthetic construct
  source 1..20: mol_type = other RNA
atacaagtccaggagatctt

SEQ ID NO: 1767 - RNA, 20 nt, synthetic construct
  source 1..20: mol_type = other RNA
ttcagcaccagcctcagaag

SEQ ID NO: 1768 - RNA, 20 nt, synthetic construct
  source 1..20: mol_type = other RNA
ggagtctgagagatggagag

SEQ ID NO: 1769 - RNA, 20 nt, synthetic construct
  source 1..20: mol_type = other RNA
ttctctctggaagggcacaa

SEQ ID NO: 1770 - RNA, 20 nt, synthetic construct
  source 1..20: mol_type = other RNA
gacgttacctcgtgcggccc

SEQ ID NO: 1771 - RNA, 20 nt, synthetic construct
  source 1..20: mol_type = other RNA
cctgcagagaaacacacttg

SEQ ID NO: 1772 - RNA, 20 nt, synthetic construct
  source 1..20: mol_type = other RNA
cagttccaaaccctggtggt

SEQ ID NO: 1773 - RNA, 20 nt, synthetic construct
  source 1..20: mol_type = other RNA
ggacccagactagcagcacc

SEQ ID NO: 1774 - RNA, 20 nt, synthetic construct
  source 1..20: mol_type = other RNA
cttacctgggctggggaaga

SEQ ID NO: 1775 - RNA, 20 nt, synthetic construct
  source 1..20: mol_type = other RNA
ttcgtatctgtaaaaccaag

SEQ ID NO: 1776 - RNA, 20 nt, synthetic construct
  source 1..20: mol_type = other RNA
tttcaaaacctgtcagtgat

SEQ ID NO: 1777 - RNA, 20 nt, synthetic construct
  source 1..20: mol_type = other RNA
ttcaaaacctgtcagtgatt

SEQ ID NO: 1778 - RNA, 20 nt, synthetic construct
  source 1..20: mol_type = other RNA
ccatcggctcgcggcgagaa

SEQ ID NO: 1779 - RNA, 20 nt, synthetic construct
  source 1..20: mol_type = other RNA
cctgtctgggagagagaagc

SEQ ID NO: 1780 - RNA, 20 nt, synthetic construct
  source 1..20: mol_type = other RNA
gctcacctggctgagcagcc

SEQ ID NO: 1781 - RNA, 20 nt, synthetic construct
  source 1..20: mol_type = other RNA
ctcacctggctgagcagcca

SEQ ID NO: 1782 - RNA, 20 nt, synthetic construct
  source 1..20: mol_type = other RNA
accaagttctggaacaaaag

SEQ ID NO: 1783 - RNA, 20 nt, synthetic construct
  source 1..20: mol_type = other RNA
gccaacctacagaaaaattg

SEQ ID NO: 1784 - RNA, 20 nt, synthetic construct
  source 1..20: mol_type = other RNA
ccaacctacagaaaaattga

SEQ ID NO: 1785 - RNA, 20 nt, synthetic construct
  source 1..20: mol_type = other RNA
agccttgcaggtgaagagac

SEQ ID NO: 1786 - RNA, 20 nt, synthetic construct
  source 1..20: mol_type = other RNA
ctcaactctttcttgtcttc

SEQ ID NO: 1787 - RNA, 20 nt, synthetic construct
  source 1..20: mol_type = other RNA
tcaactctttcttgtcttca

SEQ ID NO: 1788 - RNA, 20 nt, synthetic construct
  source 1..20: mol_type = other RNA
cactacttcaaggggagcag

SEQ ID NO: 1789 - RNA, 20 nt, synthetic construct
  source 1..20: mol_type = other RNA
acctaccgatgtgctcccgc

SEQ ID NO: 1790 - RNA, 20 nt, synthetic construct
  source 1..20: mol_type = other RNA
ctggcgtctggggtgagata

SEQ ID NO: 1791 - RNA, 20 nt, synthetic construct
  source 1..20: mol_type = other RNA
gagttaccttgtggcatggc

SEQ ID NO: 1792 - RNA, 20 nt, synthetic construct
  source 1..20: mol_type = other RNA
atcctaccttgcagggatct

SEQ ID NO: 1793 - RNA, 20 nt, synthetic construct
  source 1..20: mol_type = other RNA
tcacgtgaaagggtagacca

SEQ ID NO: 1794 - RNA, 20 nt, synthetic construct
  source 1..20: mol_type = other RNA
atctacctgggcatagttca

SEQ ID NO: 1795 - RNA, 20 nt, synthetic construct
  source 1..20: mol_type = other RNA
tgattacctgtccccaccaa

SEQ ID NO: 1796 - RNA, 20 nt, synthetic construct
  source 1..20: mol_type = other RNA
ccccaatctgccaaggaatg

SEQ ID NO: 1797 - RNA, 20 nt, synthetic construct
  source 1..20: mol_type = other RNA
ccatacctcagaggagaaca

SEQ ID NO: 1798 - RNA, 20 nt, synthetic construct
  source 1..20: mol_type = other RNA
caagctcctgggcagagatg

SEQ ID NO: 1799 - RNA, 20 nt, synthetic construct
  source 1..20: mol_type = other RNA
ttatctagaaatgaacccaa

SEQ ID NO: 1800 - RNA, 20 nt, synthetic construct
  source 1..20: mol_type = other RNA
tgggcatggccacagacgac

SEQ ID NO: 1801 - RNA, 20 nt, synthetic construct
  source 1..20: mol_type = other RNA
ctgctcaccggagcgggatg

SEQ ID NO: 1802 - RNA, 20 nt, synthetic construct
  source 1..20: mol_type = other RNA
cagttgttccaacctagcat

SEQ ID NO: 1803 - RNA, 20 nt, synthetic construct
  source 1..20: mol_type = other RNA
cactcccagggctgcgggga

SEQ ID NO: 1804 - RNA, 20 nt, synthetic construct
  source 1..20: mol_type = other RNA
ccactcccagggctgcgggg

SEQ ID NO: 1805 - RNA, 20 nt, synthetic construct
  source 1..20: mol_type = other RNA
gcgacgacagctgaagcaga

SEQ ID NO: 1806 - RNA, 20 nt, synthetic construct
  source 1..20: mol_type = other RNA
ggagagccagcctctgccgg

SEQ ID NO: 1807 - RNA, 20 nt, synthetic construct
  source 1..20: mol_type = other RNA
acatgagccagagaggggcg

SEQ ID NO: 1808 - RNA, 20 nt, synthetic construct
  source 1..20: mol_type = other RNA
gaggcagcaagaacctttca

SEQ ID NO: 1809 - RNA, 20 nt, synthetic construct
  source 1..20: mol_type = other RNA
tggcccacactcctggcggg

SEQ ID NO: 1810 - RNA, 20 nt, synthetic construct
  source 1..20: mol_type = other RNA
cgttggcccacactcctggc

SEQ ID NO: 1811 - RNA, 20 nt, synthetic construct
  source 1..20: mol_type = other RNA
ctgggactcttgggcactcc

SEQ ID NO: 1812 - RNA, 20 nt, synthetic construct
  source 1..20: mol_type = other RNA
tgcgtgcctggaggggagat

SEQ ID NO: 1813 - RNA, 20 nt, synthetic construct
  source 1..20: mol_type = other RNA
ctgcgtgcctggaggggaga

SEQ ID NO: 1814 - RNA, 20 nt, synthetic construct
  source 1..20: mol_type = other RNA
ggtgattctgacagggcaag

SEQ ID NO: 1815 - RNA, 20 nt, synthetic construct
  source 1..20: mol_type = other RNA
aagcctagcggggtgggcag

SEQ ID NO: 1816 - RNA, 20 nt, synthetic construct
  source 1..20: mol_type = other RNA
cggactcacctggaacatgc

SEQ ID NO: 1817 - RNA, 20 nt, synthetic construct
  source 1..20: mol_type = other RNA
agccctagggagtcatatga

SEQ ID NO: 1818 - RNA, 20 nt, synthetic construct
  source 1..20: mol_type = other RNA
cagccctagggagtcatatg

SEQ ID NO: 1819 - RNA, 20 nt, synthetic construct
  source 1..20: mol_type = other RNA
tctcacctgcagggtgcagt

SEQ ID NO: 1820 - RNA, 20 nt, synthetic construct
  source 1..20: mol_type = other RNA
gtctcacctgcagggtgcag

SEQ ID NO: 1821 - RNA, 20 nt, synthetic construct
  source 1..20: mol_type = other RNA
cacagcctgaggagaggcaa

SEQ ID NO: 1822 - RNA, 20 nt, synthetic construct
  source 1..20: mol_type = other RNA
gcacagcctgaggagaggca

SEQ ID NO: 1823 - RNA, 20 nt, synthetic construct
  source 1..20: mol_type = other RNA
gcactggaggacagggaaga

SEQ ID NO: 1824 - RNA, 20 nt, synthetic construct
  source 1..20: mol_type = other RNA
ggcactggaggacagggaag

SEQ ID NO: 1825 - RNA, 20 nt, synthetic construct
  source 1..20: mol_type = other RNA
cacccacctctggggtgtcc

SEQ ID NO: 1826 - RNA, 20 nt, synthetic construct
  source 1..20: mol_type = other RNA
gcacctaggaggtccagaag

SEQ ID NO: 1827 - RNA, 20 nt, synthetic construct
  source 1..20: mol_type = other RNA
cccttacccagctggtggac

SEQ ID NO: 1828 - RNA, 20 nt, synthetic construct
  source 1..20: mol_type = other RNA
cttcactatcagggggtatg

SEQ ID NO: 1829 - RNA, 20 nt, synthetic construct
  source 1..20: mol_type = other RNA
tcacttacaggtagcttcag

SEQ ID NO: 1830 - RNA, 20 nt, synthetic construct
  source 1..20: mol_type = other RNA
gttcactgcatgcaaggttg

SEQ ID NO: 1831 - RNA, 20 nt, synthetic construct
  source 1..20: mol_type = other RNA
tgttcactgcatgcaaggtt

SEQ ID NO: 1832 - RNA, 20 nt, synthetic construct
  source 1..20: mol_type = other RNA
ctgttcactgcatgcaaggt

SEQ ID NO: 1833 - RNA, 20 nt, synthetic construct
  source 1..20: mol_type = other RNA
ctctcctgtggggggccaga

SEQ ID NO: 1834 - RNA, 20 nt, synthetic construct
  source 1..20: mol_type = other RNA
actctcctgtggggggccag

SEQ ID NO: 1835 - RNA, 20 nt, synthetic construct
  source 1..20: mol_type = other RNA
gcaacttgagggagagagaa

SEQ ID NO: 1836 - RNA, 20 nt, synthetic construct
  source 1..20: mol_type = other RNA
aggtactggggagccaaggc

SEQ ID NO: 1837 - RNA, 20 nt, synthetic construct
  source 1..20: mol_type = other RNA
acctaccacatcgctcttgc

SEQ ID NO: 1838 - RNA, 20 nt, synthetic construct
  source 1..20: mol_type = other RNA
ggaccactgtgaggggcaga

SEQ ID NO: 1839 - RNA, 20 nt, synthetic construct
  source 1..20: mol_type = other RNA
aggaccactgtgaggggcag

SEQ ID NO: 1840 - RNA, 20 nt, synthetic construct
  source 1..20: mol_type = other RNA
atacctagggcagcaaaatg

SEQ ID NO: 1841 - RNA, 20 nt, synthetic construct
  source 1..20: mol_type = other RNA
gaggcatggctgaaatcttc

SEQ ID NO: 1842 - RNA, 20 nt, synthetic construct
  source 1..20: mol_type = other RNA
tctacctgtttgccaggggg

SEQ ID NO: 1843 - RNA, 20 nt, synthetic construct
  source 1..20: mol_type = other RNA
gactctacctgtttgccagg

SEQ ID NO: 1844 - RNA, 20 nt, synthetic construct
  source 1..20: mol_type = other RNA
agtcctgggaagcagagacg

SEQ ID NO: 1845 - RNA, 20 nt, synthetic construct
  source 1..20: mol_type = other RNA
gagtcctgggaagcagagac

SEQ ID NO: 1846 - RNA, 20 nt, synthetic construct
  source 1..20: mol_type = other RNA
tgagtcctgggaagcagaga

SEQ ID NO: 1847 - RNA, 20 nt, synthetic construct
  source 1..20: mol_type = other RNA
acttaccaggtgcagggtgt

SEQ ID NO: 1848 - RNA, 19 nt, synthetic construct
  source 1..19: mol_type = other RNA
ggtagacaattgcagcctg

SEQ ID NO: 1849 - RNA, 20 nt, synthetic construct
  source 1..20: mol_type = other RNA
gcctccccagctcagacctg

SEQ ID NO: 1850 - RNA, 20 nt, synthetic construct
  source 1..20: mol_type = other RNA
tccctacagacagagccaca

SEQ ID NO: 1851 - RNA, 20 nt, synthetic construct
  source 1..20: mol_type = other RNA
gagccacaaggtaatcctga

SEQ ID NO: 1852 - RNA, 20 nt, synthetic construct
  source 1..20: mol_type = other RNA
gcccaagagttgcggcgtat

SEQ ID NO: 1853 - RNA, 20 nt, synthetic construct
  source 1..20: mol_type = other RNA
aaaatacctgaaacaacaaa

SEQ ID NO: 1854 - RNA, 20 nt, synthetic construct
  source 1..20: mol_type = other RNA
caatgactgcaaagatacaa

SEQ ID NO: 1855 - RNA, 20 nt, synthetic construct
  source 1..20: mol_type = other RNA
acaatgactgcaaagataca

SEQ ID NO: 1856 - RNA, 20 nt, synthetic construct
  source 1..20: mol_type = other RNA
aatgactgcatgcaaacacc

SEQ ID NO: 1857 - RNA, 20 nt, synthetic construct
  source 1..20: mol_type = other RNA
atgactgcatgcaaacacca

SEQ ID NO: 1858 - RNA, 20 nt, synthetic construct
  source 1..20: mol_type = other RNA
tgactgcatgcaaacaccag

SEQ ID NO: 1859 - RNA, 20 nt, synthetic construct
  source 1..20: mol_type = other RNA
tactcaccttcaggtcccga

SEQ ID NO: 1860 - RNA, 20 nt, synthetic construct
  source 1..20: mol_type = other RNA
actcaccaaaccacgcctgc

SEQ ID NO: 1861 - RNA, 20 nt, synthetic construct
  source 1..20: mol_type = other RNA
taacttacctttactccatc

SEQ ID NO: 1862 - RNA, 20 nt, synthetic construct
  source 1..20: mol_type = other RNA
aggtataccagcgctggggt

SEQ ID NO: 1863 - RNA, 20 nt, synthetic construct
  source 1..20: mol_type = other RNA
tgaataccttgtttccatca

SEQ ID NO: 1864 - RNA, 20 nt, synthetic construct
  source 1..20: mol_type = other RNA
ctgaataccttgtttccatc

SEQ ID NO: 1865 - RNA, 20 nt, synthetic construct
  source 1..20: mol_type = other RNA
tcgtgctaaaggcaaaaata

SEQ ID NO: 1866 - RNA, 20 nt, synthetic construct
  source 1..20: mol_type = other RNA
agctcaccatcgtgggcctg

SEQ ID NO: 1867 - RNA, 20 nt, synthetic construct
  source 1..20: mol_type = other RNA
aagctcaccatcgtgggcct

SEQ ID NO: 1868 - RNA, 20 nt, synthetic construct
  source 1..20: mol_type = other RNA
aaagctcaccatcgtgggcc

SEQ ID NO: 1869 - RNA, 20 nt, synthetic construct
  source 1..20: mol_type = other RNA
atcctagtcagaggaggaaa

SEQ ID NO: 1870 - RNA, 20 nt, synthetic construct
  source 1..20: mol_type = other RNA
gttatcctggggttgtgtac

SEQ ID NO: 1871 - RNA, 20 nt, synthetic construct
  source 1..20: mol_type = other RNA
gaaccttcaaaggaccaaga

SEQ ID NO: 1872 - RNA, 20 nt, synthetic construct
  source 1..20: mol_type = other RNA
tcacccgctccaccctttcc

SEQ ID NO: 1873 - RNA, 20 nt, synthetic construct
  source 1..20: mol_type = other RNA
ataatctaagtcaaaataaa

SEQ ID NO: 1874 - RNA, 20 nt, synthetic construct
  source 1..20: mol_type = other RNA
agtccatctttttaaaaggc

SEQ ID NO: 1875 - RNA, 20 nt, synthetic construct
  source 1..20: mol_type = other RNA
catgaccctgtggtgggaaa

SEQ ID NO: 1876 - RNA, 20 nt, synthetic construct
  source 1..20: mol_type = other RNA
ttaccatttgaaaattcatc

SEQ ID NO: 1877 - RNA, 20 nt, synthetic construct
  source 1..20: mol_type = other RNA
catacagtcagtatcaattc

SEQ ID NO: 1878 - RNA, 20 nt, synthetic construct
  source 1..20: mol_type = other RNA
ggtgtcgaaatgagaagaag

SEQ ID NO: 1879 - RNA, 20 nt, synthetic construct
  source 1..20: mol_type = other RNA
atgcaggtgacagagactct

SEQ ID NO: 1880 - RNA, 20 nt, synthetic construct
  source 1..20: mol_type = other RNA
tggggagcaggaaatatctg

SEQ ID NO: 1881 - RNA, 20 nt, synthetic construct
  source 1..20: mol_type = other RNA
tctcaaaaccaaagatctcc

SEQ ID NO: 1882 - RNA, 20 nt, synthetic construct
  source 1..20: mol_type = other RNA
caacacaaccctgacctgtg

SEQ ID NO: 1883 - RNA, 20 nt, synthetic construct
  source 1..20: mol_type = other RNA
tcaccaaaaggaaaaaacag

SEQ ID NO: 1884 - RNA, 20 nt, synthetic construct
  source 1..20: mol_type = other RNA
agccttaccttgcgagagaa

SEQ ID NO: 1885 - RNA, 20 nt, synthetic construct
  source 1..20: mol_type = other RNA
tagccttaccttgcgagaga

SEQ ID NO: 1886 - RNA, 20 nt, synthetic construct
  source 1..20: mol_type = other RNA
tcgcaaggtaaggctactcc

SEQ ID NO: 1887 - RNA, 20 nt, synthetic construct
  source 1..20: mol_type = other RNA
ggcacactgtgggggaaggg

SEQ ID NO: 1888 - RNA, 20 nt, synthetic construct
  source 1..20: mol_type = other RNA
gtgccagagctgtgtggagc

SEQ ID NO: 1889 - RNA, 20 nt, synthetic construct
  source 1..20: mol_type = other RNA
ccgacacacaagctctgttg

SEQ ID NO: 1890 - RNA, 20 nt, synthetic construct
  source 1..20: mol_type = other RNA
ggtctatcaggtgagcgttg

SEQ ID NO: 1891 - RNA, 20 nt, synthetic construct
  source 1..20: mol_type = other RNA
gatgctcagtacagccacct

SEQ ID NO: 1892 - RNA, 20 nt, synthetic construct
  source 1..20: mol_type = other RNA
ccgactgcatctttgtttca

SEQ ID NO: 1893 - RNA, 20 nt, synthetic construct
  source 1..20: mol_type = other RNA
actcacctgataagaggcag

SEQ ID NO: 1894 - RNA, 20 nt, synthetic construct
  source 1..20: mol_type = other RNA
taccacctgaaaatgaaaaa

SEQ ID NO: 1895 - RNA, 20 nt, synthetic construct
  source 1..20: mol_type = other RNA
acacagacacgtgagtttat

SEQ ID NO: 1896 - RNA, 20 nt, synthetic construct
  source 1..20: mol_type = other RNA
tatatgctggggagaaagaa

SEQ ID NO: 1897 - RNA, 20 nt, synthetic construct
  source 1..20: mol_type = other RNA
ttatatgctggggagaaaga

SEQ ID NO: 1898 - RNA, 20 nt, synthetic construct
  source 1..20: mol_type = other RNA
ctggattacctcttgccctc

SEQ ID NO: 1899 - RNA, 20 nt, synthetic construct
  source 1..20: mol_type = other RNA
acactgtggggggtggggtg

SEQ ID NO: 1900 - RNA, 20 nt, synthetic construct
  source 1..20: mol_type = other RNA
cacactgtggggggtggggt

SEQ ID NO: 1901 - RNA, 20 nt, synthetic construct
  source 1..20: mol_type = other RNA
acacactgtggggggtgggg

SEQ ID NO: 1902 - RNA, 20 nt, synthetic construct
  source 1..20: mol_type = other RNA
ttgtcctgcggaggaaggag

SEQ ID NO: 1903 - RNA, 20 nt, synthetic construct
  source 1..20: mol_type = other RNA
tttgtcctgcggaggaagga

SEQ ID NO: 1904 - RNA, 20 nt, synthetic construct
  source 1..20: mol_type = other RNA
ttttgtcctgcggaggaagg

SEQ ID NO: 1905 - RNA, 20 nt, synthetic construct
  source 1..20: mol_type = other RNA
gttacctcatagtctgggtt

SEQ ID NO: 1906 - RNA, 20 nt, synthetic construct
  source 1..20: mol_type = other RNA
cgttacctcatagtctgggt

SEQ ID NO: 1907 - RNA, 20 nt, synthetic construct
  source 1..20: mol_type = other RNA
catggaacaggggaagggcc

SEQ ID NO: 1908 - RNA, 20 nt, synthetic construct
  source 1..20: mol_type = other RNA
cttcaaggtaagggcctact

SEQ ID NO: 1909 - RNA, 20 nt, synthetic construct
  source 1..20: mol_type = other RNA
tctcctacctttgattgact

SEQ ID NO: 1910 - RNA, 20 nt, synthetic construct
  source 1..20: mol_type = other RNA
ttctcctacctttgattgac

SEQ ID NO: 1911 - RNA, 20 nt, synthetic construct
  source 1..20: mol_type = other RNA
tggcccagtcaatcaaaggt

SEQ ID NO: 1912 - RNA, 20 nt, synthetic construct
  source 1..20: mol_type = other RNA
acatacttctgtaatacact

SEQ ID NO: 1913 - RNA, 20 nt, synthetic construct
  source 1..20: mol_type = other RNA
tgactatcaagaagatggtt

SEQ ID NO: 1914 - RNA, 20 nt, synthetic construct
  source 1..20: mol_type = other RNA
tttaaaccatgtgatatttt

SEQ ID NO: 1915 - RNA, 20 nt, synthetic construct
  source 1..20: mol_type = other RNA
ctcttccattgggtacataa

SEQ ID NO: 1916 - RNA, 20 nt, synthetic construct
  source 1..20: mol_type = other RNA
tgaccagctctaccaggtaa

SEQ ID NO: 1917 - RNA, 20 nt, synthetic construct
  source 1..20: mol_type = other RNA
gaccagtacagccaccttca

SEQ ID NO: 1918 - RNA, 20 nt, synthetic construct
  source 1..20: mol_type = other RNA
accttcaaggaaaccagttg

SEQ ID NO: 1919 - RNA, 20 nt, synthetic construct
  source 1..20: mol_type = other RNA
ggttcattgtggccttgccg

SEQ ID NO: 1920 - RNA, 20 nt, synthetic construct
  source 1..20: mol_type = other RNA
gagcgctaagtggaaaagaa

SEQ ID NO: 1921 - RNA, 20 nt, synthetic construct
  source 1..20: mol_type = other RNA
aaccctacctttagttaaga

SEQ ID NO: 1922 - RNA, 20 nt, synthetic construct
  source 1..20: mol_type = other RNA
ggcagtcactgtggagggaa

SEQ ID NO: 1923 - RNA, 20 nt, synthetic construct
  source 1..20: mol_type = other RNA
tggaaagctggaggtgggaa

SEQ ID NO: 1924 - RNA, 20 nt, synthetic construct
  source 1..20: mol_type = other RNA
cctcacctctcatcaccacc

SEQ ID NO: 1925 - RNA, 20 nt, synthetic construct
  source 1..20: mol_type = other RNA
agtggctgcagaggaacgag

SEQ ID NO: 1926 - RNA, 20 nt, synthetic construct
  source 1..20: mol_type = other RNA
gcgctgtccagggacaagaa

SEQ ID NO: 1927 - RNA, 20 nt, synthetic construct
  source 1..20: mol_type = other RNA
tccttactgaggacactggc

SEQ ID NO: 1928 - RNA, 20 nt, synthetic construct
  source 1..20: mol_type = other RNA
ccatctggagcttagggtcc

SEQ ID NO: 1929 - RNA, 20 nt, synthetic construct
  source 1..20: mol_type = other RNA
ggttggcatgtggaggcagc

SEQ ID NO: 1930 - RNA, 20 nt, synthetic construct
  source 1..20: mol_type = other RNA
gggtcataccagctgagccg

SEQ ID NO: 1931 - RNA, 20 nt, synthetic construct
  source 1..20: mol_type = other RNA
ctccagagcccacaggtaag

SEQ ID NO: 1932 - RNA, 20 nt, synthetic construct
  source 1..20: mol_type = other RNA
accacaactccagagcccac

SEQ ID NO: 1933 - RNA, 20 nt, synthetic construct
  source 1..20: mol_type = other RNA
tgaggcccaggacaagaccc

SEQ ID NO: 1934 - RNA, 20 nt, synthetic construct
  source 1..20: mol_type = other RNA
tttccagcccaaggtgcaga

SEQ ID NO: 1935 - RNA, 20 nt, synthetic construct
  source 1..20: mol_type = other RNA
gcgccagtggattggcccaa

SEQ ID NO: 1936 - RNA, 20 nt, synthetic construct
  source 1..20: mol_type = other RNA
aaggccatgacgcgctcccc

SEQ ID NO: 1937 - RNA, 20 nt, synthetic construct
  source 1..20: mol_type = other RNA
tcacggagcagcaaggccag

SEQ ID NO: 1938 - RNA, 20 nt, synthetic construct
  source 1..20: mol_type = other RNA
cgcggacctggcaggaagac

SEQ ID NO: 1939 - RNA, 20 nt, synthetic construct
  source 1..20: mol_type = other RNA
tcacctgcgccccccgccgc

SEQ ID NO: 1940 - RNA, 20 nt, synthetic construct
  source 1..20: mol_type = other RNA
cttactgtggttgcagtaaa

SEQ ID NO: 1941 - RNA, 20 nt, synthetic construct
  source 1..20: mol_type = other RNA
acttactgtggttgcagtaa

SEQ ID NO: 1942 - RNA, 20 nt, synthetic construct
  source 1..20: mol_type = other RNA
ttggccatagggctccaggc

SEQ ID NO: 1943 - RNA, 20 nt, synthetic construct
  source 1..20: mol_type = other RNA
gttggccatagggctccagg

SEQ ID NO: 1944 - RNA, 20 nt, synthetic construct
  source 1..20: mol_type = other RNA
gcgccagcagtggagcggtc

SEQ ID NO: 1945 - RNA, 20 nt, synthetic construct
  source 1..20: mol_type = other RNA
aattaccttgttgcaaggta

SEQ ID NO: 1946 - RNA, 20 nt, synthetic construct
  source 1..20: mol_type = other RNA
ctatcagccactaatgaagt

SEQ ID NO: 1947 - RNA, 20 nt, synthetic construct
  source 1..20: mol_type = other RNA
ctgctccaaagaagaatcta

SEQ ID NO: 1948 - RNA, 20 nt, synthetic construct
  source 1..20: mol_type = other RNA
actatcaatcttgcccagac

SEQ ID NO: 1949 - RNA, 20 nt, synthetic construct
  source 1..20: mol_type = other RNA
ttttccagaatactgaaaca

SEQ ID NO: 1950 - RNA, 20 nt, synthetic construct
  source 1..20: mol_type = other RNA
gttttccagaatactgaaac

SEQ ID NO: 1951 - RNA, 20 nt, synthetic construct
  source 1..20: mol_type = other RNA
ttacctgtagatattcttgc

SEQ ID NO: 1952 - RNA, 20 nt, synthetic construct
  source 1..20: mol_type = other RNA
ctcaccccaagtgactcgag

SEQ ID NO: 1953 - RNA, 20 nt, synthetic construct
  source 1..20: mol_type = other RNA
gtgcatccagcgcttcgcac

SEQ ID NO: 1954 - RNA, 20 nt, synthetic construct
  source 1..20: mol_type = other RNA
gagctgcagctgaatcacac

SEQ ID NO: 1955 - RNA, 20 nt, synthetic construct
  source 1..20: mol_type = other RNA
ctggcaggggggcccagcac

SEQ ID NO: 1956 - RNA, 20 nt, synthetic construct
  source 1..20: mol_type = other RNA
ctcccagcgcctgacgcccc

SEQ ID NO: 1957 - RNA, 20 nt, synthetic construct
  source 1..20: mol_type = other RNA
ccccctgccagtatagcctg

SEQ ID NO: 1958 - RNA, 20 nt, synthetic construct
  source 1..20: mol_type = other RNA
cccccctgccagtatagcct

SEQ ID NO: 1959 - RNA, 20 nt, synthetic construct
  source 1..20: mol_type = other RNA
tgagcccatcccgccagtcc

SEQ ID NO: 1960 - RNA, 20 nt, synthetic construct
  source 1..20: mol_type = other RNA
tcaccagccccagcaggcag

SEQ ID NO: 1961 - RNA, 20 nt, synthetic construct
  source 1..20: mol_type = other RNA
aagtactggggacacagagc

SEQ ID NO: 1962 - RNA, 20 nt, synthetic construct
  source 1..20: mol_type = other RNA
acttcacctgggcaaggcag

SEQ ID NO: 1963 - RNA, 20 nt, synthetic construct
  source 1..20: mol_type = other RNA
cacttcacctgggcaaggca

SEQ ID NO: 1964 - RNA, 20 nt, synthetic construct
  source 1..20: mol_type = other RNA
ccgcacacctcctggtacac

SEQ ID NO: 1965 - RNA, 20 nt, synthetic construct
  source 1..20: mol_type = other RNA
agccctgcaagggcagaatg

SEQ ID NO: 1966 - RNA, 20 nt, synthetic construct
  source 1..20: mol_type = other RNA
ccaggagctgtggggagagg

SEQ ID NO: 1967 - RNA, 20 nt, synthetic construct
  source 1..20: mol_type = other RNA
gttcttaccagagagcagga

SEQ ID NO: 1968 - RNA, 20 nt, synthetic construct
  source 1..20: mol_type = other RNA
gcacctaaaaaagaaggtta

SEQ ID NO: 1969 - RNA, 20 nt, synthetic construct
  source 1..20: mol_type = other RNA
ttggcaggaccaggaaaact

SEQ ID NO: 1970 - RNA, 20 nt, synthetic construct
  source 1..20: mol_type = other RNA
caatcttcagatcaaggaca

SEQ ID NO: 1971 - RNA, 20 nt, synthetic construct
  source 1..20: mol_type = other RNA
gtaatccaaggaatgtggtc

SEQ ID NO: 1972 - RNA, 20 nt, synthetic construct
  source 1..20: mol_type = other RNA
agagtgaacagaccaagaaa

SEQ ID NO: 1973 - RNA, 20 nt, synthetic construct
  source 1..20: mol_type = other RNA
ggacatccagtctggtggtg

SEQ ID NO: 1974 - RNA, 20 nt, synthetic construct
  source 1..20: mol_type = other RNA
aatgcatcctggaatggaaa

SEQ ID NO: 1975 - RNA, 20 nt, synthetic construct
  source 1..20: mol_type = other RNA
gcactcacctgtgaatagaa

SEQ ID NO: 1976 - RNA, 20 nt, synthetic construct
  source 1..20: mol_type = other RNA
taaaacagctgagacttaaa

SEQ ID NO: 1977 - RNA, 20 nt, synthetic construct
  source 1..20: mol_type = other RNA
gcttcctacaagaaaaggtc

SEQ ID NO: 1978 - RNA, 20 nt, synthetic construct
  source 1..20: mol_type = other RNA
ttacccagaccttttcttgt

SEQ ID NO: 1979 - RNA, 20 nt, synthetic construct
  source 1..20: mol_type = other RNA
cagcatttccacaggacaga

SEQ ID NO: 1980 - RNA, 20 nt, synthetic construct
  source 1..20: mol_type = other RNA
ccagcatttccacaggacag

SEQ ID NO: 1981 - RNA, 20 nt, synthetic construct
  source 1..20: mol_type = other RNA
acttaccaaatacaaaaacc

SEQ ID NO: 1982 - RNA, 20 nt, synthetic construct
  source 1..20: mol_type = other RNA
gattctgatcagaaaggcat

SEQ ID NO: 1983 - RNA, 20 nt, synthetic construct
  source 1..20: mol_type = other RNA
tgaattctgaggaatacaga

SEQ ID NO: 1984 - RNA, 20 nt, synthetic construct
  source 1..20: mol_type = other RNA
atgacatacgtgatttctcc

SEQ ID NO: 1985 - RNA, 20 nt, synthetic construct
  source 1..20: mol_type = other RNA
tcctgctcctgcacaagaaa

SEQ ID NO: 1986 - RNA, 20 nt, synthetic construct
  source 1..20: mol_type = other RNA
tcaccctaggagcaaaacaa

SEQ ID NO: 1987 - RNA, 20 nt, synthetic construct
  source 1..20: mol_type = other RNA
cgcagcatcttcctgtgagg

SEQ ID NO: 1988 - RNA, 20 nt, synthetic construct
  source 1..20: mol_type = other RNA
gctcctgggggtagggggag

SEQ ID NO: 1989 - RNA, 20 nt, synthetic construct
  source 1..20: mol_type = other RNA
ggtgctcaccggccacctgc

SEQ ID NO: 1990 - RNA, 20 nt, synthetic construct
  source 1..20: mol_type = other RNA
agggagctggaggtgacaga

SEQ ID NO: 1991 - RNA, 20 nt, synthetic construct
  source 1..20: mol_type = other RNA
tagggagctggaggtgacag

SEQ ID NO: 1992 - RNA, 20 nt, synthetic construct
  source 1..20: mol_type = other RNA
gcaacctgtggggcttctct

SEQ ID NO: 1993 - RNA, 20 nt, synthetic construct
  source 1..20: mol_type = other RNA
agcaacctgtggggcttctc

SEQ ID NO: 1994 - RNA, 20 nt, synthetic construct
  source 1..20: mol_type = other RNA
ctcctgggggcggggtcaga

SEQ ID NO: 1995 - RNA, 20 nt, synthetic construct
  source 1..20: mol_type = other RNA
gctcctgggggcggggtcag

SEQ ID NO: 1996 - RNA, 20 nt, synthetic construct
  source 1..20: mol_type = other RNA
gcagggctgtaaaaaaagga

SEQ ID NO: 1997 - RNA, 20 nt, synthetic construct
  source 1..20: mol_type = other RNA
catcatcttcatttcatgat

SEQ ID NO: 1998 - RNA, 20 nt, synthetic construct
  source 1..20: mol_type = other RNA
ccatcatcttcatttcatga

SEQ ID NO: 1999 - RNA, 20 nt, synthetic construct
  source 1..20: mol_type = other RNA
gtccattgtcacagcctctg

SEQ ID NO: 2000 - RNA, 20 nt, synthetic construct
  source 1..20: mol_type = other RNA
cactcacccatctttcctct

SEQ ID NO: 2001 - RNA, 20 nt, synthetic construct
  source 1..20: mol_type = other RNA
acttactctgatgtaggaag

SEQ ID NO: 2002 - RNA, 20 nt, synthetic construct
  source 1..20: mol_type = other RNA
cttactctgatgtaggaagt

SEQ ID NO: 2003 - RNA, 20 nt, synthetic construct
  source 1..20: mol_type = other RNA
ttggaatacctgatagtctg

SEQ ID NO: 2004 - RNA, 20 nt, synthetic construct
  source 1..20: mol_type = other RNA
ggaacgctggaaaggagatg

SEQ ID NO: 2005 - RNA, 20 nt, synthetic construct
  source 1..20: mol_type = other RNA
gaacgctggaaaggagatga

SEQ ID NO: 2006 - RNA, 20 nt, synthetic construct
  source 1..20: mol_type = other RNA
acgtttgacatctttctccc

SEQ ID NO: 2007 - RNA, 20 nt, synthetic construct
  source 1..20: mol_type = other RNA
caaacgtgcgagtgtctaac

SEQ ID NO: 2008 - RNA, 20 nt, synthetic construct
  source 1..20: mol_type = other RNA
cgagtggcaagaggtggaga

SEQ ID NO: 2009 - RNA, 20 nt, synthetic construct
  source 1..20: mol_type = other RNA
gagtggcaagaggtggagaa

SEQ ID NO: 2010 - RNA, 20 nt, synthetic construct
  source 1..20: mol_type = other RNA
aggagagccaggatgtcagc

SEQ ID NO: 2011 - RNA, 20 nt, synthetic construct
  source 1..20: mol_type = other RNA
ggacagccagacggggttag

SEQ ID NO: 2012 - RNA, 20 nt, synthetic construct
  source 1..20: mol_type = other RNA
cggagcaatgcgcaggaata

SEQ ID NO: 2013 - RNA, 20 nt, synthetic construct
  source 1..20: mol_type = other RNA
aggaagcgacctgcaaccga

SEQ ID NO: 2014 - RNA, 20 nt, synthetic construct
  source 1..20: mol_type = other RNA
gagcagacgcccaagaagcc

SEQ ID NO: 2015 - RNA, 20 nt, synthetic construct
  source 1..20: mol_type = other RNA
gctgcagagcctgctgctct

SEQ ID NO: 2016 - RNA, 20 nt, synthetic construct
  source 1..20: mol_type = other RNA
gctcccagggctgcgtgctg

SEQ ID NO: 2017 - RNA, 20 nt, synthetic construct
  source 1..20: mol_type = other RNA
tgctcccagggctgcgtgct

SEQ ID NO: 2018 - RNA, 20 nt, synthetic construct
  source 1..20: mol_type = other RNA
atgctcccagggctgcgtgc

SEQ ID NO: 2019 - RNA, 20 nt, synthetic construct
  source 1..20: mol_type = other RNA
aggcactcaccggggttgga

SEQ ID NO: 2020 - RNA, 20 nt, synthetic construct
  source 1..20: mol_type = other RNA
ctggctcccagcagtcaaag

SEQ ID NO: 2021 - RNA, 20 nt, synthetic construct
  source 1..20: mol_type = other RNA
tgacatcttctcaggagctc

SEQ ID NO: 2022 - RNA, 20 nt, synthetic construct
  source 1..20: mol_type = other RNA
tcacggcatgaggctgagtt

SEQ ID NO: 2023 - RNA, 20 nt, synthetic construct
  source 1..20: mol_type = other RNA
gaaccaactggggagcagca

SEQ ID NO: 2024 - RNA, 20 nt, synthetic construct
  source 1..20: mol_type = other RNA
ggaaccaactggggagcagc

SEQ ID NO: 2025 - RNA, 20 nt, synthetic construct
  source 1..20: mol_type = other RNA
tcacctccaccagctgcatg

SEQ ID NO: 2026 - RNA, 20 nt, synthetic construct
  source 1..20: mol_type = other RNA
gtagtgctgcagggtgtggg

SEQ ID NO: 2027 - RNA, 20 nt, synthetic construct
  source 1..20: mol_type = other RNA
tgtagtgctgcagggtgtgg

SEQ ID NO: 2028 - RNA, 20 nt, synthetic construct
  source 1..20: mol_type = other RNA
cacgtctgggggcagagagg

SEQ ID NO: 2029 - RNA, 20 nt, synthetic construct
  source 1..20: mol_type = other RNA
catcacgtctgggggcagag

SEQ ID NO: 2030 - RNA, 20 nt, synthetic construct
  source 1..20: mol_type = other RNA
aggctcccctgggggcagga

SEQ ID NO: 2031 - RNA, 20 nt, synthetic construct
  source 1..20: mol_type = other RNA
tcactcacagcgagaacttg

SEQ ID NO: 2032 - RNA, 20 nt, synthetic construct
  source 1..20: mol_type = other RNA
cagccccaccttctctctca

SEQ ID NO: 2033 - RNA, 20 nt, synthetic construct
  source 1..20: mol_type = other RNA
gagaatttctgccatgtgga

SEQ ID NO: 2034 - RNA, 20 nt, synthetic construct
  source 1..20: mol_type = other RNA
atactcacaattcttggata

SEQ ID NO: 2035 - RNA, 20 nt, synthetic construct
  source 1..20: mol_type = other RNA
caggggctgtggccaggggg

SEQ ID NO: 2036 - RNA, 20 nt, synthetic construct
  source 1..20: mol_type = other RNA
actcacctttgcagaagaca

SEQ ID NO: 2037 - RNA, 20 nt, synthetic construct
  source 1..20: mol_type = other RNA
cactcacctttgcagaagac

SEQ ID NO: 2038 - RNA, 20 nt, synthetic construct
  source 1..20: mol_type = other RNA
agggccaggtcctggtagcc

SEQ ID NO: 2039 - RNA, 20 nt, synthetic construct
  source 1..20: mol_type = other RNA
ggcccagcctgctgtggtac

SEQ ID NO: 2040 - RNA, 20 nt, synthetic construct
  source 1..20: mol_type = other RNA
gcttcggcaggctgacagcc

SEQ ID NO: 2041 - RNA, 20 nt, synthetic construct
  source 1..20: mol_type = other RNA
tatccaaggactgagggcca

SEQ ID NO: 2042 - RNA, 20 nt, synthetic construct
  source 1..20: mol_type = other RNA
ggaacccagatttatgtaat

SEQ ID NO: 2043 - RNA, 20 nt, synthetic construct
  source 1..20: mol_type = other RNA
gctcaccaattacataaatc

SEQ ID NO: 2044 - RNA, 20 nt, synthetic construct
  source 1..20: mol_type = other RNA
ctcaccaattacataaatct

SEQ ID NO: 2045 - RNA, 20 nt, synthetic construct
  source 1..20: mol_type = other RNA
ctcagctgaacctggctacc

SEQ ID NO: 2046 - RNA, 20 nt, synthetic construct
  source 1..20: mol_type = other RNA
ttaacatctactacatacaa

SEQ ID NO: 2047 - RNA, 20 nt, synthetic construct
  source 1..20: mol_type = other RNA
cttacctggatatagtcaac

SEQ ID NO: 2048 - RNA, 20 nt, synthetic construct
  source 1..20: mol_type = other RNA
atccagcgtaagaataacag

SEQ ID NO: 2049 - RNA, 20 nt, synthetic construct
  source 1..20: mol_type = other RNA
gtatgtacaacaaaataatg

SEQ ID NO: 2050 - RNA, 20 nt, synthetic construct
  source 1..20: mol_type = other RNA
cgagatcaagttgtacgtta

SEQ ID NO: 2051 - RNA, 20 nt, synthetic construct
  source 1..20: mol_type = other RNA
tgccagatgttaatgatttt

SEQ ID NO: 2052 - RNA, 20 nt, synthetic construct
  source 1..20: mol_type = other RNA
atgtcagttcacgtcaaaac

SEQ ID NO: 2053 - RNA, 20 nt, synthetic construct
  source 1..20: mol_type = other RNA
gccctacagtccctcgcctg

SEQ ID NO: 2054 - RNA, 20 nt, synthetic construct
  source 1..20: mol_type = other RNA
gtccagaatttccagaagta

SEQ ID NO: 2055 - RNA, 20 nt, synthetic construct
  source 1..20: mol_type = other RNA
tccctggaggggtgggggag

SEQ ID NO: 2056 - RNA, 20 nt, synthetic construct
  source 1..20: mol_type = other RNA
tcacttcaacaggactccta

SEQ ID NO: 2057 - RNA, 20 nt, synthetic construct
  source 1..20: mol_type = other RNA
ccttacactcaaaggcaaag

SEQ ID NO: 2058 - RNA, 20 nt, synthetic construct
  source 1..20: mol_type = other RNA
atggctgcagggagaggaag

SEQ ID NO: 2059 - RNA, 20 nt, synthetic construct
  source 1..20: mol_type = other RNA
ggagcgccaggggatgctgg

SEQ ID NO: 2060 - RNA, 20 nt, synthetic construct
  source 1..20: mol_type = other RNA
tcacgtcccatgcagccaca

SEQ ID NO: 2061 - RNA, 20 nt, synthetic construct
  source 1..20: mol_type = other RNA
tggacgtctggtggggagta

SEQ ID NO: 2062 - RNA, 20 nt, synthetic construct
  source 1..20: mol_type = other RNA
actcacattgatgaggaaga

SEQ ID NO: 2063 - RNA, 20 nt, synthetic construct
  source 1..20: mol_type = other RNA
cagcatctgagaaaggcaga

SEQ ID NO: 2064 - RNA, 20 nt, synthetic construct
  source 1..20: mol_type = other RNA
aatccaacacctcagcgatg

SEQ ID NO: 2065 - RNA, 20 nt, synthetic construct
  source 1..20: mol_type = other RNA
atccaacacctcagcgatgt

SEQ ID NO: 2066 - RNA, 20 nt, synthetic construct
  source 1..20: mol_type = other RNA
gtggccattccttagtcttg

SEQ ID NO: 2067 - RNA, 20 nt, synthetic construct
  source 1..20: mol_type = other RNA
cttaccgatgttcccttcga

SEQ ID NO: 2068 - RNA, 20 nt, synthetic construct
  source 1..20: mol_type = other RNA
ttaaacaattgtgtgaagat

SEQ ID NO: 2069 - RNA, 20 nt, synthetic construct
  source 1..20: mol_type = other RNA
taaacaattgtgtgaagatt

SEQ ID NO: 2070 - RNA, 20 nt, synthetic construct
  source 1..20: mol_type = other RNA
caccatctggcaacaggttc

SEQ ID NO: 2071 - RNA, 20 nt, synthetic construct
  source 1..20: mol_type = other RNA
aagtactcaagatgaatttg

SEQ ID NO: 2072 - RNA, 20 nt, synthetic construct
  source 1..20: mol_type = other RNA
caatgtctcagaaaaatggt

SEQ ID NO: 2073 - RNA, 20 nt, synthetic construct
  source 1..20: mol_type = other RNA
gctcagcttgcctctctgaa

SEQ ID NO: 2074 - RNA, 20 nt, synthetic construct
  source 1..20: mol_type = other RNA
tttatcaagactggcatgac

SEQ ID NO: 2075 - RNA, 20 nt, synthetic construct
  source 1..20: mol_type = other RNA
atttggccaaagccttgaat

SEQ ID NO: 2076 - RNA, 20 nt, synthetic construct
  source 1..20: mol_type = other RNA
ttatcttcaagccactccag

SEQ ID NO: 2077 - RNA, 20 nt, synthetic construct
  source 1..20: mol_type = other RNA
cttacttcagtgtcctatgc

SEQ ID NO: 2078 - RNA, 20 nt, synthetic construct
  source 1..20: mol_type = other RNA
accccattttgttccgcctc

SEQ ID NO: 2079 - RNA, 20 nt, synthetic construct
  source 1..20: mol_type = other RNA
tcacattctaacttgtcttc

SEQ ID NO: 2080 - RNA, 20 nt, synthetic construct
  source 1..20: mol_type = other RNA
tgactgtggggtgttttagg

SEQ ID NO: 2081 - RNA, 20 nt, synthetic construct
  source 1..20: mol_type = other RNA
gtgactgtggggtgttttag

SEQ ID NO: 2082 - RNA, 20 nt, synthetic construct
  source 1..20: mol_type = other RNA
ggtgactgtggggtgtttta

SEQ ID NO: 2083 - RNA, 20 nt, synthetic construct
  source 1..20: mol_type = other RNA
aggtgactgtggggtgtttt

SEQ ID NO: 2084 - RNA, 20 nt, synthetic construct
  source 1..20: mol_type = other RNA
aatctgagcacagagtggaa

SEQ ID NO: 2085 - RNA, 20 nt, synthetic construct
  source 1..20: mol_type = other RNA
tgaagaatctgagcacagag

SEQ ID NO: 2086 - RNA, 20 nt, synthetic construct
  source 1..20: mol_type = other RNA
tgattggaccttggggagaa

SEQ ID NO: 2087 - RNA, 20 nt, synthetic construct
  source 1..20: mol_type = other RNA
gtggatctgaaagacgaggt

SEQ ID NO: 2088 - RNA, 20 nt, synthetic construct
  source 1..20: mol_type = other RNA
cgtggatctgaaagacgagg

SEQ ID NO: 2089 - RNA, 20 nt, synthetic construct
  source 1..20: mol_type = other RNA
ctgtacccgcagagcctcag

SEQ ID NO: 2090 - RNA, 20 nt, synthetic construct
  source 1..20: mol_type = other RNA
aatcggagcctgagacaaag

SEQ ID NO: 2091 - RNA, 20 nt, synthetic construct
  source 1..20: mol_type = other RNA
acttacctcctccccatctt

SEQ ID NO: 2092 - RNA, 20 nt, synthetic construct
  source 1..20: mol_type = other RNA
aacctaggagtggagaagac

SEQ ID NO: 2093 - RNA, 20 nt, synthetic construct
  source 1..20: mol_type = other RNA
agaggcatcctggagagttc

SEQ ID NO: 2094 - RNA, 20 nt, synthetic construct
  source 1..20: mol_type = other RNA
cccacagatctgagaggagg

SEQ ID NO: 2095 - RNA, 20 nt, synthetic construct
  source 1..20: mol_type = other RNA
ttaggtctggggacgaagta

SEQ ID NO: 2096 - RNA, 20 nt, synthetic construct
  source 1..20: mol_type = other RNA
cttaggtctggggacgaagt

SEQ ID NO: 2097 - RNA, 20 nt, synthetic construct
  source 1..20: mol_type = other RNA
tgtggtgctataggaggcca

SEQ ID NO: 2098 - RNA, 20 nt, synthetic construct
  source 1..20: mol_type = other RNA
gaccctggaagagttggggc

SEQ ID NO: 2099 - RNA, 20 nt, synthetic construct
  source 1..20: mol_type = other RNA
ctgactcctagccacgggat

SEQ ID NO: 2100 - RNA, 20 nt, synthetic construct
  source 1..20: mol_type = other RNA
ctgctgcaggacaggaagag

SEQ ID NO: 2101 - RNA, 20 nt, synthetic construct
  source 1..20: mol_type = other RNA
acttacctcgcggacattcc

SEQ ID NO: 2102 - RNA, 20 nt, synthetic construct
  source 1..20: mol_type = other RNA
aaggttggctgggggagaag

SEQ ID NO: 2103 - RNA, 20 nt, synthetic construct
  source 1..20: mol_type = other RNA
aaaggttggctgggggagaa

SEQ ID NO: 2104 - RNA, 20 nt, synthetic construct
  source 1..20: mol_type = other RNA
atccctgagggtagacagga

SEQ ID NO: 2105 - RNA, 20 nt, synthetic construct
  source 1..20: mol_type = other RNA
tggaatccctgagggtagac

SEQ ID NO: 2106 - RNA, 20 nt, synthetic construct
  source 1..20: mol_type = other RNA
gtggtactgaggagagcgag

SEQ ID NO: 2107 - RNA, 20 nt, synthetic construct
  source 1..20: mol_type = other RNA
tgtggtactgaggagagcga

SEQ ID NO: 2108 - RNA, 20 nt, synthetic construct
  source 1..20: mol_type = other RNA
ctgtggtactgaggagagcg

SEQ ID NO: 2109 - RNA, 20 nt, synthetic construct
  source 1..20: mol_type = other RNA
agtactcacctggggcctcc

SEQ ID NO: 2110 - RNA, 20 nt, synthetic construct
  source 1..20: mol_type = other RNA
gtattctgcaagggaagcag

SEQ ID NO: 2111 - RNA, 20 nt, synthetic construct
  source 1..20: mol_type = other RNA
agtattctgcaagggaagca

SEQ ID NO: 2112 - RNA, 20 nt, synthetic construct
  source 1..20: mol_type = other RNA
gagtattctgcaagggaagc

SEQ ID NO: 2113 - RNA, 20 nt, synthetic construct
  source 1..20: mol_type = other RNA
ctcctgggagacaaggtgag

SEQ ID NO: 2114 - RNA, 20 nt, synthetic construct
  source 1..20: mol_type = other RNA
tttgcaccctggatgggatg

SEQ ID NO: 2115 - RNA, 20 nt, synthetic construct
  source 1..20: mol_type = other RNA
agcctgggctcatgggaaga

SEQ ID NO: 2116 - RNA, 20 nt, synthetic construct
  source 1..20: mol_type = other RNA
gcttaccccaccccagttga

SEQ ID NO: 2117 - RNA, 20 nt, synthetic construct
  source 1..20: mol_type = other RNA
tgcttaccccaccccagttg

SEQ ID NO: 2118 - RNA, 20 nt, synthetic construct
  source 1..20: mol_type = other RNA
tagccctgggggagcaggca

SEQ ID NO: 2119 - RNA, 20 nt, synthetic construct
  source 1..20: mol_type = other RNA
gtagccctgggggagcaggc

SEQ ID NO: 2120 - RNA, 20 nt, synthetic construct
  source 1..20: mol_type = other RNA
ggcaactggaaaaaggtcaa

SEQ ID NO: 2121 - RNA, 20 nt, synthetic construct
  source 1..20: mol_type = other RNA
gggcaactggaaaaaggtca

SEQ ID NO: 2122 - RNA, 20 nt, synthetic construct
  source 1..20: mol_type = other RNA
gctgccaacctcgagactcg

SEQ ID NO: 2123 - RNA, 20 nt, synthetic construct
  source 1..20: mol_type = other RNA
agctgtctgtgggagacaga

SEQ ID NO: 2124 - RNA, 20 nt, synthetic construct
  source 1..20: mol_type = other RNA
aagctgtctgtgggagacag

SEQ ID NO: 2125 - RNA, 20 nt, synthetic construct
  source 1..20: mol_type = other RNA
ctcctcacctggggatgttc

SEQ ID NO: 2126 - RNA, 20 nt, synthetic construct
  source 1..20: mol_type = other RNA
cccactcaccaacgacgtca

SEQ ID NO: 2127 - RNA, 20 nt, synthetic construct
  source 1..20: mol_type = other RNA
gtactcgctgtgcagggggg

SEQ ID NO: 2128 - RNA, 20 nt, synthetic construct
  source 1..20: mol_type = other RNA
gacgtactcgctgtgcaggg

SEQ ID NO: 2129 - RNA, 20 nt, synthetic construct
  source 1..20: mol_type = other RNA
ggacgtactcgctgtgcagg

SEQ ID NO: 2130 - RNA, 20 nt, synthetic construct
  source 1..20: mol_type = other RNA
gggacgtactcgctgtgcag

SEQ ID NO: 2131 - RNA, 20 nt, synthetic construct
  source 1..20: mol_type = other RNA
tgctggctgtcgggcagggc

SEQ ID NO: 2132 - RNA, 20 nt, synthetic construct
  source 1..20: mol_type = other RNA
gctcctgttgagagaagcaa

SEQ ID NO: 2133 - RNA, 20 nt, synthetic construct
  source 1..20: mol_type = other RNA
agtggtggctgtgggagaga

SEQ ID NO: 2134 - RNA, 20 nt, synthetic construct
  source 1..20: mol_type = other RNA
gctcctgtggggggaggtca

SEQ ID NO: 2135 - RNA, 20 nt, synthetic construct
  source 1..20: mol_type = other RNA
tgctcctgtggggggaggtc

SEQ ID NO: 2136 - RNA, 20 nt, synthetic construct
  source 1..20: mol_type = other RNA
tcaccggggcgtgggtgagc

SEQ ID NO: 2137 - RNA, 20 nt, synthetic construct
  source 1..20: mol_type = other RNA
ggagctgagggcaggaggca

SEQ ID NO: 2138 - RNA, 20 nt, synthetic construct
  source 1..20: mol_type = other RNA
ccggctcaccgtggtccagc

SEQ ID NO: 2139 - RNA, 20 nt, synthetic construct
  source 1..20: mol_type = other RNA
gggggctggagaaggggagg

SEQ ID NO: 2140 - RNA, 20 nt, synthetic construct
  source 1..20: mol_type = other RNA
tgggggggctggagaagggg

SEQ ID NO: 2141 - RNA, 20 nt, synthetic construct
  source 1..20: mol_type = other RNA
cccgctgggggagcaggggc

SEQ ID NO: 2142 - RNA, 20 nt, synthetic construct
  source 1..20: mol_type = other RNA
tctccccgctgggggagcag

SEQ ID NO: 2143 - RNA, 20 nt, synthetic construct
  source 1..20: mol_type = other RNA
acactggaggcgggcgggga

SEQ ID NO: 2144 - RNA, 20 nt, synthetic construct
  source 1..20: mol_type = other RNA
cacactggaggcgggcgggg

SEQ ID NO: 2145 - RNA, 20 nt, synthetic construct
  source 1..20: mol_type = other RNA
catcacactggaggcgggcg

SEQ ID NO: 2146 - RNA, 20 nt, synthetic construct
  source 1..20: mol_type = other RNA
ctacgcgagcagggcgctcc

SEQ ID NO: 2147 - RNA, 20 nt, synthetic construct
  source 1..20: mol_type = other RNA
tggctgttgggcacagagac

SEQ ID NO: 2148 - RNA, 20 nt, synthetic construct
  source 1..20: mol_type = other RNA
actgacttctgctgcaggac

SEQ ID NO: 2149 - RNA, 20 nt, synthetic construct
  source 1..20: mol_type = other RNA
tccccatggcgactaggcca

SEQ ID NO: 2150 - RNA, 20 nt, synthetic construct
  source 1..20: mol_type = other RNA
ttccccatggcgactaggcc

SEQ ID NO: 2151 - RNA, 20 nt, synthetic construct
  source 1..20: mol_type = other RNA
gaacctgcatttccggggag

SEQ ID NO: 2152 - RNA, 20 nt, synthetic construct
  source 1..20: mol_type = other RNA
gtggcgaacctgcatttccg

SEQ ID NO: 2153 - RNA, 20 nt, synthetic construct
  source 1..20: mol_type = other RNA
tcactgggggaggaagaaca

SEQ ID NO: 2154 - RNA, 20 nt, synthetic construct
  source 1..20: mol_type = other RNA
accctgtatgggcagagttc

SEQ ID NO: 2155 - RNA, 20 nt, synthetic construct
  source 1..20: mol_type = other RNA
gaccctgtatgggcagagtt

SEQ ID NO: 2156 - RNA, 20 nt, synthetic construct
  source 1..20: mol_type = other RNA
aagtcctggggggaggtccg

SEQ ID NO: 2157 - RNA, 20 nt, synthetic construct
  source 1..20: mol_type = other RNA
gaagtcctggggggaggtcc

SEQ ID NO: 2158 - RNA, 20 nt, synthetic construct
  source 1..20: mol_type = other RNA
ggaagtcctggggggaggtc

SEQ ID NO: 2159 - RNA, 20 nt, synthetic construct
  source 1..20: mol_type = other RNA
aggttcctctgcaaaaggac

SEQ ID NO: 2160 - RNA, 20 nt, synthetic construct
  source 1..20: mol_type = other RNA
gttaccttgatgaccggcgg

SEQ ID NO: 2161 - RNA, 20 nt, synthetic construct
  source 1..20: mol_type = other RNA
tgtgttaccttgatgaccgg

SEQ ID NO: 2162 - RNA, 20 nt, synthetic construct
  source 1..20: mol_type = other RNA
cacctgtgggacgcccagga

SEQ ID NO: 2163 - RNA, 20 nt, synthetic construct
  source 1..20: mol_type = other RNA
attccacctgtgggacgccc

SEQ ID NO: 2164 - RNA, 20 nt, synthetic construct
  source 1..20: mol_type = other RNA
cctcacctgcgggcagcatc

SEQ ID NO: 2165 - RNA, 20 nt, synthetic construct
  source 1..20: mol_type = other RNA
atgccacctgtggaaagaat

SEQ ID NO: 2166 - RNA, 20 nt, synthetic construct
  source 1..20: mol_type = other RNA
gatgccacctgtggaaagaa

SEQ ID NO: 2167 - RNA, 20 nt, synthetic construct
  source 1..20: mol_type = other RNA
tttaccttgtggccgggctc

SEQ ID NO: 2168 - RNA, 20 nt, synthetic construct
  source 1..20: mol_type = other RNA
tttctgggagaggggcaggt

SEQ ID NO: 2169 - RNA, 20 nt, synthetic construct
  source 1..20: mol_type = other RNA
tccttttctgggagaggggc

SEQ ID NO: 2170 - RNA, 20 nt, synthetic construct
  source 1..20: mol_type = other RNA
ctcacctggagggaaagcag

SEQ ID NO: 2171 - RNA, 20 nt, synthetic construct
  source 1..20: mol_type = other RNA
ttacctgtgcttgcttctct

SEQ ID NO: 2172 - RNA, 20 nt, synthetic construct
  source 1..20: mol_type = other RNA
gttacctgtgcttgcttctc

SEQ ID NO: 2173 - RNA, 20 nt, synthetic construct
  source 1..20: mol_type = other RNA
aagacctaggattcggggaa

SEQ ID NO: 2174 - RNA, 20 nt, synthetic construct
  source 1..20: mol_type = other RNA
aaagacctaggattcgggga

SEQ ID NO: 2175 - RNA, 20 nt, synthetic construct
  source 1..20: mol_type = other RNA
acccacctgtagcagtggcc

SEQ ID NO: 2176 - RNA, 20 nt, synthetic construct
  source 1..20: mol_type = other RNA
gacccacctgtagcagtggc

SEQ ID NO: 2177 - RNA, 20 nt, synthetic construct
  source 1..20: mol_type = other RNA
agcctggatggagagaaacc

SEQ ID NO: 2178 - RNA, 20 nt, synthetic construct
  source 1..20: mol_type = other RNA
cagcctggatggagagaaac

SEQ ID NO: 2179 - RNA, 20 nt, synthetic construct
  source 1..20: mol_type = other RNA
ccttacctttctgctttctg

SEQ ID NO: 2180 - RNA, 20 nt, synthetic construct
  source 1..20: mol_type = other RNA
gccttacctttctgctttct

SEQ ID NO: 2181 - RNA, 20 nt, synthetic construct
  source 1..20: mol_type = other RNA
ggccttacctttctgctttc

SEQ ID NO: 2182 - RNA, 20 nt, synthetic construct
  source 1..20: mol_type = other RNA
caccctggagatggaggtgg

SEQ ID NO: 2183 - RNA, 20 nt, synthetic construct
  source 1..20: mol_type = other RNA
cttcaccctggagatggagg

SEQ ID NO: 2184 - RNA, 20 nt, synthetic construct
  source 1..20: mol_type = other RNA
acaaacccagcagcaccatg

SEQ ID NO: 2185 - RNA, 20 nt, synthetic construct
  source 1..20: mol_type = other RNA
gcgcctggggaacgaagagg

SEQ ID NO: 2186 - RNA, 20 nt, synthetic construct
  source 1..20: mol_type = other RNA
ggcgcctggggaacgaagag

SEQ ID NO: 2187 - RNA, 20 nt, synthetic construct
  source 1..20: mol_type = other RNA
cggcgcctggggaacgaaga

SEQ ID NO: 2188 - RNA, 20 nt, synthetic construct
  source 1..20: mol_type = other RNA
acggcgcctggggaacgaag

SEQ ID NO: 2189 - RNA, 20 nt, synthetic construct
  source 1..20: mol_type = other RNA
ccgtacctgcggtggtcagc

SEQ ID NO: 2190 - RNA, 20 nt, synthetic construct
  source 1..20: mol_type = other RNA
agacgcctgggggccggggg

SEQ ID NO: 2191 - RNA, 20 nt, synthetic construct
  source 1..20: mol_type = other RNA
actcacagaacacgctggcc

SEQ ID NO: 2192 - RNA, 20 nt, synthetic construct
  source 1..20: mol_type = other RNA
cacctacctgcccttccagc

SEQ ID NO: 2193 - RNA, 20 nt, synthetic construct
  source 1..20: mol_type = other RNA
aagacctgatgagagaccac

SEQ ID NO: 2194 - RNA, 20 nt, synthetic construct
  source 1..20: mol_type = other RNA
gcaggtctgcaggggaggga

SEQ ID NO: 2195 - RNA, 20 nt, synthetic construct
  source 1..20: mol_type = other RNA
acgtcctgggggcggcgggc

SEQ ID NO: 2196 - RNA, 20 nt, synthetic construct
  source 1..20: mol_type = other RNA
gtcatcctgaggagagaagc

SEQ ID NO: 2197 - RNA, 20 nt, synthetic construct
  source 1..20: mol_type = other RNA
tcactgcacggcttgttcat

SEQ ID NO: 2198 - RNA, 20 nt, synthetic construct
  source 1..20: mol_type = other RNA
atgcaggctatgggggtggg

SEQ ID NO: 2199 - RNA, 20 nt, synthetic construct
  source 1..20: mol_type = other RNA
catgcaggctatgggggtgg

SEQ ID NO: 2200 - RNA, 20 nt, synthetic construct
  source 1..20: mol_type = other RNA
gtctttttcattgactagaa

SEQ ID NO: 2201 - RNA, 20 nt, synthetic construct
  source 1..20: mol_type = other RNA
tgacttaccttaacgttttc

SEQ ID NO: 2202 - RNA, 20 nt, synthetic construct
  source 1..20: mol_type = other RNA
tgcatcaagtagaagaatgc

SEQ ID NO: 2203 - RNA, 20 nt, synthetic construct
  source 1..20: mol_type = other RNA
ctctttccatgcaatcagtc

SEQ ID NO: 2204 - RNA, 20 nt, synthetic construct
  source 1..20: mol_type = other RNA
gttcagaaagtaaatgaaat

SEQ ID NO: 2205 - RNA, 20 nt, synthetic construct
  source 1..20: mol_type = other RNA
tcactttccatcctgtacaa

SEQ ID NO: 2206 - RNA, 20 nt, synthetic construct
  source 1..20: mol_type = other RNA
ggccaagaggaaggtgccta

SEQ ID NO: 2207 - RNA, 20 nt, synthetic construct
  source 1..20: mol_type = other RNA
gctctgcaatttcgcctcta

SEQ ID NO: 2208 - RNA, 20 nt, synthetic construct
  source 1..20: mol_type = other RNA
actctggcagaaactggcca

SEQ ID NO: 2209 - RNA, 20 nt, synthetic construct
  source 1..20: mol_type = other RNA
tatacttgcctgaatgtcct

SEQ ID NO: 2210 - RNA, 20 nt, synthetic construct
  source 1..20: mol_type = other RNA
aacttaccccaaaatccccc

SEQ ID NO: 2211 - RNA, 20 nt, synthetic construct
  source 1..20: mol_type = other RNA
ctgtgctcagccttgggagg

SEQ ID NO: 2212 - RNA, 20 nt, synthetic construct
  source 1..20: mol_type = other RNA
ttttatctagaagtgaagtg

SEQ ID NO: 2213 - RNA, 20 nt, synthetic construct
  source 1..20: mol_type = other RNA
tttatctagaagtgaagtga

SEQ ID NO: 2214 - RNA, 20 nt, synthetic construct
  source 1..20: mol_type = other RNA
ttatctagaagtgaagtgag

SEQ ID NO: 2215 - RNA, 20 nt, synthetic construct
  source 1..20: mol_type = other RNA
tatctagaagtgaagtgagg

SEQ ID NO: 2216 - RNA, 20 nt, synthetic construct
  source 1..20: mol_type = other RNA
aaattaccttgccaatgaaa

SEQ ID NO: 2217 - RNA, 20 nt, synthetic construct
  source 1..20: mol_type = other RNA
cccaccttcttccccaggcg

SEQ ID NO: 2218 - RNA, 20 nt, synthetic construct
  source 1..20: mol_type = other RNA
gagcagaacgacctggagcc

SEQ ID NO: 2219 - RNA, 20 nt, synthetic construct
  source 1..20: mol_type = other RNA
gtcctgccagatgaacctgg

SEQ ID NO: 2220 - RNA, 20 nt, synthetic construct
  source 1..20: mol_type = other RNA
cctggtacaagaggttcagc

SEQ ID NO: 2221 - RNA, 20 nt, synthetic construct
  source 1..20: mol_type = other RNA
gtgacctccagaacaggagt

SEQ ID NO: 2222 - RNA, 20 nt, synthetic construct
  source 1..20: mol_type = other RNA
tgacctccagaacaggagtg

SEQ ID NO: 2223 - RNA, 20 nt, synthetic construct
  source 1..20: mol_type = other RNA
gttccatgacatcggggaca

SEQ ID NO: 2224 - RNA, 20 nt, synthetic construct
  source 1..20: mol_type = other RNA
ggagttcatagctgggctcc

SEQ ID NO: 2225 - RNA, 20 nt, synthetic construct
  source 1..20: mol_type = other RNA
cctacccacctcctttctca

SEQ ID NO: 2226 - RNA, 20 nt, synthetic construct
  source 1..20: mol_type = other RNA
gtacctcattgaatccagat

SEQ ID NO: 2227 - RNA, 20 nt, synthetic construct
  source 1..20: mol_type = other RNA
cttccaatctggattcaatg

SEQ ID NO: 2228 - RNA, 20 nt, synthetic construct
  source 1..20: mol_type = other RNA
ctcctaagaggaaagatggt

SEQ ID NO: 2229 - RNA, 20 nt, synthetic construct
  source 1..20: mol_type = other RNA
tctcctaagaggaaagatgg

SEQ ID NO: 2230 - RNA, 20 nt, synthetic construct
  source 1..20: mol_type = other RNA
aagtctcctaagaggaaaga

SEQ ID NO: 2231 - RNA, 20 nt, synthetic construct
  source 1..20: mol_type = other RNA
ccacctttttctgcaggaac

SEQ ID NO: 2232 - RNA, 20 nt, synthetic construct
  source 1..20: mol_type = other RNA
agctgcaggcacagaaccag

SEQ ID NO: 2233 - RNA, 20 nt, synthetic construct
  source 1..20: mol_type = other RNA
ggcacagaaccagtggctgc

SEQ ID NO: 2234 - RNA, 20 nt, synthetic construct
  source 1..20: mol_type = other RNA
gttcctgcagtccagcctga

SEQ ID NO: 2235 - RNA, 20 nt, synthetic construct
  source 1..20: mol_type = other RNA
tgggggtactggggcaggga

SEQ ID NO: 2236 - RNA, 20 nt, synthetic construct
  source 1..20: mol_type = other RNA
attccctcaacttggtgtgg

SEQ ID NO: 2237 - RNA, 20 nt, synthetic construct
  source 1..20: mol_type = other RNA
cggccagcatgcttcctcct

SEQ ID NO: 2238 - RNA, 20 nt, synthetic construct
  source 1..20: mol_type = other RNA
tgactgttagacacaaaaca

SEQ ID NO: 2239 - RNA, 20 nt, synthetic construct
  source 1..20: mol_type = other RNA
ctcctgccagttagcagtcc

SEQ ID NO: 2240 - RNA, 20 nt, synthetic construct
  source 1..20: mol_type = other RNA
actcaaacctttcagggttg

SEQ ID NO: 2241 - RNA, 20 nt, synthetic construct
  source 1..20: mol_type = other RNA
cctggcaagacccccactcc

SEQ ID NO: 2242 - RNA, 20 nt, synthetic construct
  source 1..20: mol_type = other RNA
ttgacctgagggcgggggca

SEQ ID NO: 2243 - RNA, 20 nt, synthetic construct
  source 1..20: mol_type = other RNA
cgtggtgcagcttcgtgccc

SEQ ID NO: 2244 - RNA, 20 nt, synthetic construct
  source 1..20: mol_type = other RNA
acctgtccaaggcgtgccca

SEQ ID NO: 2245 - RNA, 20 nt, synthetic construct
  source 1..20: mol_type = other RNA
ctgggtcccaaatgccaccc

SEQ ID NO: 2246 - RNA, 20 nt, synthetic construct
  source 1..20: mol_type = other RNA
ggattctgcggacagaagaa

SEQ ID NO: 2247 - RNA, 20 nt, synthetic construct
  source 1..20: mol_type = other RNA
ggagctcacctgcatggggg

SEQ ID NO: 2248 - RNA, 20 nt, synthetic construct
  source 1..20: mol_type = other RNA
tttgctgcaggaagaacaaa

SEQ ID NO: 2249 - RNA, 20 nt, synthetic construct
  source 1..20: mol_type = other RNA
gcagcaaatgaaggatcagc

SEQ ID NO: 2250 - RNA, 20 nt, synthetic construct
  source 1..20: mol_type = other RNA
accctaagggcaggagccaa

SEQ ID NO: 2251 - RNA, 20 nt, synthetic construct
  source 1..20: mol_type = other RNA
gatgatccagttttacctgg

SEQ ID NO: 2252 - RNA, 20 nt, synthetic construct
  source 1..20: mol_type = other RNA
gaaccaagacccagacatca

SEQ ID NO: 2253 - RNA, 20 nt, synthetic construct
  source 1..20: mol_type = other RNA
ccaggcagtgtgagtcagct

SEQ ID NO: 2254 - RNA, 20 nt, synthetic construct
  source 1..20: mol_type = other RNA
tggccctccagctgtatgtg

SEQ ID NO: 2255 - RNA, 20 nt, synthetic construct
  source 1..20: mol_type = other RNA
cttcaaaccacacagacgga

SEQ ID NO: 2256 - RNA, 20 nt, synthetic construct
  source 1..20: mol_type = other RNA
tgggtgtccagtggaggatg

SEQ ID NO: 2257 - RNA, 20 nt, synthetic construct
  source 1..20: mol_type = other RNA
gcttcaaaccacacagacgg

SEQ ID NO: 2258 - RNA, 20 nt, synthetic construct
  source 1..20: mol_type = other RNA
tccatacctgaggagatacc

SEQ ID NO: 2259 - RNA, 20 nt, synthetic construct
  source 1..20: mol_type = other RNA
tgacggtccagttggagtgc

SEQ ID NO: 2260 - RNA, 20 nt, synthetic construct
  source 1..20: mol_type = other RNA
ccccataccgtgaagtttcc

SEQ ID NO: 2261 - RNA, 20 nt, synthetic construct
  source 1..20: mol_type = other RNA
tgactcacactgcctggtga

SEQ ID NO: 2262 - RNA, 20 nt, synthetic construct
  source 1..20: mol_type = other RNA
ctgactcacactgcctggtg

SEQ ID NO: 2263 - RNA, 20 nt, synthetic construct
  source 1..20: mol_type = other RNA
accaggcagtgtgagtcagc

SEQ ID NO: 2264 - RNA, 20 nt, synthetic construct
  source 1..20: mol_type = other RNA
ttgaagagctggggaagaga

SEQ ID NO: 2265 - RNA, 20 nt, synthetic construct
  source 1..20: mol_type = other RNA
agctccagtcagatattccc

SEQ ID NO: 2266 - RNA, 20 nt, synthetic construct
  source 1..20: mol_type = other RNA
agttcaaaactctgagggcc

SEQ ID NO: 2267 - RNA, 20 nt, synthetic construct
  source 1..20: mol_type = other RNA
tagttcaaaactctgagggc

SEQ ID NO: 2268 - RNA, 20 nt, synthetic construct
  source 1..20: mol_type = other RNA
ctggttccactgtcccgttg

SEQ ID NO: 2269 - RNA, 20 nt, synthetic construct
  source 1..20: mol_type = other RNA
gctggttccactgtcccgtt

SEQ ID NO: 2270 - RNA, 20 nt, synthetic construct
  source 1..20: mol_type = other RNA
tggcattccagggttacctg

SEQ ID NO: 2271 - RNA, 20 nt, synthetic construct
  source 1..20: mol_type = other RNA
ggctggttccactgtcccgt

SEQ ID NO: 2272 - RNA, 20 nt, synthetic construct
  source 1..20: mol_type = other RNA
gccggagaccttgaagagcg

SEQ ID NO: 2273 - RNA, 20 nt, synthetic construct
  source 1..20: mol_type = other RNA
ggcggccgaggcggagagtt

SEQ ID NO: 2274 - RNA, 20 nt, synthetic construct
  source 1..20: mol_type = other RNA
cgttctcccacaccagcccg

SEQ ID NO: 2275 - RNA, 20 nt, synthetic construct
  source 1..20: mol_type = other RNA
cgcggttgtagtcctgcttg

SEQ ID NO: 2276 - RNA, 20 nt, synthetic construct
  source 1..20: mol_type = other RNA
ctaccttttttggctccctc

SEQ ID NO: 2277 - RNA, 20 nt, synthetic construct
  source 1..20: mol_type = other RNA
gtcttccaggtgggagggtc

SEQ ID NO: 2278 - RNA, 20 nt, synthetic construct
  source 1..20: mol_type = other RNA
ctcctacatgtttggggaaa

SEQ ID NO: 2279 - RNA, 20 nt, synthetic construct
  source 1..20: mol_type = other RNA
atacctgggctgggagcgaa

SEQ ID NO: 2280 - RNA, 20 nt, synthetic construct
  source 1..20: mol_type = other RNA
catacctgggctgggagcga

SEQ ID NO: 2281 - RNA, 20 nt, synthetic construct
  source 1..20: mol_type = other RNA
agccaagcagctcaccctgg

SEQ ID NO: 2282 - RNA, 20 nt, synthetic construct
  source 1..20: mol_type = other RNA
cccagcccaggtatggtgga

SEQ ID NO: 2283 - RNA, 20 nt, synthetic construct
  source 1..20: mol_type = other RNA
ctgctaaaggagtgcaggag

SEQ ID NO: 2284 - RNA, 20 nt, synthetic construct
  source 1..20: mol_type = other RNA
tccttaccattttcacaagc

SEQ ID NO: 2285 - RNA, 20 nt, synthetic construct
  source 1..20: mol_type = other RNA
ccttaccattttcacaagct

SEQ ID NO: 2286 - RNA, 20 nt, synthetic construct
  source 1..20: mol_type = other RNA
agtccctccagcttcggtcg

SEQ ID NO: 2287 - RNA, 20 nt, synthetic construct
  source 1..20: mol_type = other RNA
gtccctccagcttcggtcga

SEQ ID NO: 2288 - RNA, 20 nt, synthetic construct
  source 1..20: mol_type = other RNA
tccctccagcttcggtcgag

SEQ ID NO: 2289 - RNA, 20 nt, synthetic construct
  source 1..20: mol_type = other RNA
taccaatgtcccatgacgtt

SEQ ID NO: 2290 - RNA, 20 nt, synthetic construct
  source 1..20: mol_type = other RNA
gccttgccagtggtggccgc

SEQ ID NO: 2291 - RNA, 20 nt, synthetic construct
  source 1..20: mol_type = other RNA
ccttgccagtggtggccgcg

SEQ ID NO: 2292 - RNA, 20 nt, synthetic construct
  source 1..20: mol_type = other RNA
gcactcacctgagaacgcca

SEQ ID NO: 2293 - RNA, 20 nt, synthetic construct
  source 1..20: mol_type = other RNA
agtctgcaaacacagagctc

SEQ ID NO: 2294 - RNA, 20 nt, synthetic construct
  source 1..20: mol_type = other RNA
tgtgccagagcaggatctac

SEQ ID NO: 2295 - RNA, 20 nt, synthetic construct
  source 1..20: mol_type = other RNA
gtgccagagcaggatctact

SEQ ID NO: 2296 - RNA, 20 nt, synthetic construct
  source 1..20: mol_type = other RNA
gacacacagcagttcttgtc

SEQ ID NO: 2297 - RNA, 20 nt, synthetic construct
  source 1..20: mol_type = other RNA
ctgcaagcgtttgctcacca

SEQ ID NO: 2298 - RNA, 20 nt, synthetic construct
  source 1..20: mol_type = other RNA
ttccaggtgactctatgctt

SEQ ID NO: 2299 - RNA, 20 nt, synthetic construct
  source 1..20: mol_type = other RNA
ccttctcatggcaggtgtcc

SEQ ID NO: 2300 - RNA, 20 nt, synthetic construct
  source 1..20: mol_type = other RNA
cccacagattcagggactcc

SEQ ID NO: 2301 - RNA, 20 nt, synthetic construct
  source 1..20: mol_type = other RNA
acccacagattcagggactc

SEQ ID NO: 2302 - RNA, 20 nt, synthetic construct
  source 1..20: mol_type = other RNA
gctctttaccttaaaaatgg

SEQ ID NO: 2303 - RNA, 20 nt, synthetic construct
  source 1..20: mol_type = other RNA
ttacatttttgctcttcctc

SEQ ID NO: 2304 - RNA, 20 nt, synthetic construct
  source 1..20: mol_type = other RNA
gaaggctgcacagtcagggg

SEQ ID NO: 2305 - RNA, 20 nt, synthetic construct
  source 1..20: mol_type = other RNA
aaggctgcacagtcagggga

SEQ ID NO: 2306 - RNA, 20 nt, synthetic construct
  source 1..20: mol_type = other RNA
acagaaggctgcacagtcag

SEQ ID NO: 2307 - RNA, 20 nt, synthetic construct
  source 1..20: mol_type = other RNA
caccatctgggagaatgctg

SEQ ID NO: 2308 - RNA, 20 nt, synthetic construct
  source 1..20: mol_type = other RNA
ggagaatgctgtggacaaga

SEQ ID NO: 2309 - RNA, 20 nt, synthetic construct
  source 1..20: mol_type = other RNA
ggtacagacctcggaagaac

SEQ ID NO: 2310 - RNA, 20 nt, synthetic construct
  source 1..20: mol_type = other RNA
cagacctcggaagaactggc

SEQ ID NO: 2311 - RNA, 20 nt, synthetic construct
  source 1..20: mol_type = other RNA
ctgcagctctggaatgacac

SEQ ID NO: 2312 - RNA, 20 nt, synthetic construct
  source 1..20: mol_type = other RNA
gcacatccgggcggcccagg

SEQ ID NO: 2313 - RNA, 20 nt, synthetic construct
  source 1..20: mol_type = other RNA
ggatacggccgggcccctgg

SEQ ID NO: 2314 - RNA, 20 nt, synthetic construct
  source 1..20: mol_type = other RNA
tctggtcagggctcggacac

SEQ ID NO: 2315 - RNA, 20 nt, synthetic construct
  source 1..20: mol_type = other RNA
ggacagtacttttacccccg

SEQ ID NO: 2316 - RNA, 20 nt, synthetic construct
  source 1..20: mol_type = other RNA
gagcaggagggcttcgccga

SEQ ID NO: 2317 - RNA, 20 nt, synthetic construct
  source 1..20: mol_type = other RNA
gcgcagctgggcttgggccg

SEQ ID NO: 2318 - RNA, 20 nt, synthetic construct
  source 1..20: mol_type = other RNA
ggaaccgcagaccgtgccgg

SEQ ID NO: 2319 - RNA, 20 nt, synthetic construct
  source 1..20: mol_type = other RNA
cagccgggacgccacgccgc

SEQ ID NO: 2320 - RNA, 20 nt, synthetic construct
  source 1..20: mol_type = other RNA
agaccaagagcgcatcaaag

SEQ ID NO: 2321 - RNA, 20 nt, synthetic construct
  source 1..20: mol_type = other RNA
caagcggctgcggaaccggc

SEQ ID NO: 2322 - RNA, 20 nt, synthetic construct
  source 1..20: mol_type = other RNA
gcggctgcggaaccggctgg

SEQ ID NO: 2323 - RNA, 20 nt, synthetic construct
  source 1..20: mol_type = other RNA
tctctttccatcttctgtcg

SEQ ID NO: 2324 - RNA, 20 nt, synthetic construct
  source 1..20: mol_type = other RNA
atgacttaccctcctgcgtg

SEQ ID NO: 2325 - RNA, 20 nt, synthetic construct
  source 1..20: mol_type = other RNA
cttaccctcctgcgtgtgga

SEQ ID NO: 2326 - RNA, 20 nt, synthetic construct
  source 1..20: mol_type = other RNA
tggggttcaaacattccgcc

SEQ ID NO: 2327 - RNA, 20 nt, synthetic construct
  source 1..20: mol_type = other RNA
agctttctgtaaacaggggc

SEQ ID NO: 2328 - RNA, 20 nt, synthetic construct
  source 1..20: mol_type = other RNA
tactgaccagctgaggagcc

SEQ ID NO: 2329 - RNA, 20 nt, synthetic construct
  source 1..20: mol_type = other RNA
ctactgaccagctgaggagc

SEQ ID NO: 2330 - RNA, 20 nt, synthetic construct
  source 1..20: mol_type = other RNA
catctaagaaagacagaaac

SEQ ID NO: 2331 - RNA, 20 nt, synthetic construct
  source 1..20: mol_type = other RNA
gggggccctaaggacagtcg

SEQ ID NO: 2332 - RNA, 20 nt, synthetic construct
  source 1..20: mol_type = other RNA
ggggggccctaaggacagtc

SEQ ID NO: 2333 - RNA, 20 nt, synthetic construct
  source 1..20: mol_type = other RNA
tgtcttggggagaaaataca

SEQ ID NO: 2334 - RNA, 20 nt, synthetic construct
  source 1..20: mol_type = other RNA
ggcctaagagggagagaccc

SEQ ID NO: 2335 - RNA, 20 nt, synthetic construct
  source 1..20: mol_type = other RNA
cccataccttagcgtggaaa

SEQ ID NO: 2336 - RNA, 20 nt, synthetic construct
  source 1..20: mol_type = other RNA
acccacccatgacagcttaa

SEQ ID NO: 2337 - RNA, 20 nt, synthetic construct
  source 1..20: mol_type = other RNA
tagacctaccttaatcatgg

SEQ ID NO: 2338 - RNA, 20 nt, synthetic construct
  source 1..20: mol_type = other RNA
cacaactcctggggacagtc

SEQ ID NO: 2339 - RNA, 20 nt, synthetic construct
  source 1..20: mol_type = other RNA
aacttacatagagaataaag

SEQ ID NO: 2340 - RNA, 20 nt, synthetic construct
  source 1..20: mol_type = other RNA
acttacatagagaataaaga

SEQ ID NO: 2341 - RNA, 20 nt, synthetic construct
  source 1..20: mol_type = other RNA
gaaccagatcaggagccaac

SEQ ID NO: 2342 - RNA, 20 nt, synthetic construct
  source 1..20: mol_type = other RNA
ctgtgtactgaggggcagaa

SEQ ID NO: 2343 - RNA, 20 nt, synthetic construct
  source 1..20: mol_type = other RNA
gctgtgtactgaggggcaga

SEQ ID NO: 2344 - RNA, 20 nt, synthetic construct
  source 1..20: mol_type = other RNA
tgtactgaggggcagaaggg

SEQ ID NO: 2345 - RNA, 20 nt, synthetic construct
  source 1..20: mol_type = other RNA
ggtgctcccaggagcggagg

SEQ ID NO: 2346 - RNA, 20 nt, synthetic construct
  source 1..20: mol_type = other RNA
agaggaacaaggagacattg

SEQ ID NO: 2347 - RNA, 20 nt, synthetic construct
  source 1..20: mol_type = other RNA
gactcactcttctgtttcta

SEQ ID NO: 2348 - RNA, 20 nt, synthetic construct
  source 1..20: mol_type = other RNA
gaaaggcagcttttggcacc

SEQ ID NO: 2349 - RNA, 20 nt, synthetic construct
  source 1..20: mol_type = other RNA
agccacagaagccatgggat

SEQ ID NO: 2350 - RNA, 20 nt, synthetic construct
  source 1..20: mol_type = other RNA
cccccgggagtccatcaagt

SEQ ID NO: 2351 - RNA, 20 nt, synthetic construct
  source 1..20: mol_type = other RNA
taacctaggaagaaaaaaga

SEQ ID NO: 2352 - RNA, 20 nt, synthetic construct
  source 1..20: mol_type = other RNA
ctcacccttggccatgtact

SEQ ID NO: 2353 - RNA, 20 nt, synthetic construct
  source 1..20: mol_type = other RNA
cctgaactggaggtgaacaa

SEQ ID NO: 2354 - RNA, 20 nt, synthetic construct
  source 1..20: mol_type = other RNA
tgcaatctgaaaacagaaat

SEQ ID NO: 2355 - RNA, 20 nt, synthetic construct
  source 1..20: mol_type = other RNA
cacctaaggaagaagatatg

SEQ ID NO: 2356 - RNA, 20 nt, synthetic construct
  source 1..20: mol_type = other RNA
agcagcagccttagagcaca

SEQ ID NO: 2357 - RNA, 20 nt, synthetic construct
  source 1..20: mol_type = other RNA
cactcacccgcagggaggag

SEQ ID NO: 2358 - RNA, 20 nt, synthetic construct
  source 1..20: mol_type = other RNA
aggatcctggagaggaagga

SEQ ID NO: 2359 - RNA, 20 nt, synthetic construct
  source 1..20: mol_type = other RNA
ggatcctggagaggaaggag

SEQ ID NO: 2360 - RNA, 20 nt, synthetic construct
  source 1..20: mol_type = other RNA
gatgaccaactctgggtagg

SEQ ID NO: 2361 - RNA, 20 nt, synthetic construct
  source 1..20: mol_type = other RNA
ccttaccctcaggatttctc

SEQ ID NO: 2362 - RNA, 20 nt, synthetic construct
  source 1..20: mol_type = other RNA
gtgattcaccgggatatcaa

SEQ ID NO: 2363 - RNA, 20 nt, synthetic construct
  source 1..20: mol_type = other RNA
caactgtgggaggaagaaaa

SEQ ID NO: 2364 - RNA, 20 nt, synthetic construct
  source 1..20: mol_type = other RNA
gcctcttactctgtaatcat

SEQ ID NO: 2365 - RNA, 20 nt, synthetic construct
  source 1..20: mol_type = other RNA
tcttactctgtaatcatagg

SEQ ID NO: 2366 - RNA, 20 nt, synthetic construct
  source 1..20: mol_type = other RNA
agagagctggggagaggaga

SEQ ID NO: 2367 - RNA, 20 nt, synthetic construct
  source 1..20: mol_type = other RNA
ctgaacaggaaggagagcca

SEQ ID NO: 2368 - RNA, 20 nt, synthetic construct
  source 1..20: mol_type = other RNA
atggaactgttggaaaaagc

SEQ ID NO: 2369 - RNA, 20 nt, synthetic construct
  source 1..20: mol_type = other RNA
ttgagcagcagaaagaacag

SEQ ID NO: 2370 - RNA, 20 nt, synthetic construct
  source 1..20: mol_type = other RNA
ggagagagcgggaagctaga

SEQ ID NO: 2371 - RNA, 20 nt, synthetic construct
  source 1..20: mol_type = other RNA
ccttcagcagcagctgctcc

SEQ ID NO: 2372 - RNA, 20 nt, synthetic construct
  source 1..20: mol_type = other RNA
ggcactccttggagagggag

SEQ ID NO: 2373 - RNA, 20 nt, synthetic construct
  source 1..20: mol_type = other RNA
ctcccgccatcggcactcct

SEQ ID NO: 2374 - RNA, 20 nt, synthetic construct
  source 1..20: mol_type = other RNA
gaagcccagtctaagcagac

SEQ ID NO: 2375 - RNA, 20 nt, synthetic construct
  source 1..20: mol_type = other RNA
gtcgctacctgtggctccgc

SEQ ID NO: 2376 - RNA, 20 nt, synthetic construct
  source 1..20: mol_type = other RNA
tagaccaagccttttgggta

SEQ ID NO: 2377 - RNA, 20 nt, synthetic construct
  source 1..20: mol_type = other RNA
gggcagcagaatagccaggc

SEQ ID NO: 2378 - RNA, 20 nt, synthetic construct
  source 1..20: mol_type = other RNA
aggcttctgtgggagagagt

SEQ ID NO: 2379 - RNA, 20 nt, synthetic construct
  source 1..20: mol_type = other RNA
tgggtctcagagtggctccg

SEQ ID NO: 2380 - RNA, 20 nt, synthetic construct
  source 1..20: mol_type = other RNA
atgatgctgttgggttcaaa

SEQ ID NO: 2381 - RNA, 20 nt, synthetic construct
  source 1..20: mol_type = other RNA
tgatgctgttgggttcaaaa

SEQ ID NO: 2382 - RNA, 20 nt, synthetic construct
  source 1..20: mol_type = other RNA
atccttacagcaggcttgag

SEQ ID NO: 2383 - RNA, 20 nt, synthetic construct
  source 1..20: mol_type = other RNA
aatccttacagcaggcttga

SEQ ID NO: 2384 - RNA, 20 nt, synthetic construct
  source 1..20: mol_type = other RNA
taggccacagagtgacaccc

SEQ ID NO: 2385 - RNA, 20 nt, synthetic construct
  source 1..20: mol_type = other RNA
ccgaagacgatttcaacaaa

SEQ ID NO: 2386 - RNA, 20 nt, synthetic construct
  source 1..20: mol_type = other RNA
aagcagggatggacaaccgt

SEQ ID NO: 2387 - RNA, 20 nt, synthetic construct
  source 1..20: mol_type = other RNA
tccccagcccattgtctgat

SEQ ID NO: 2388 - RNA, 20 nt, synthetic construct
  source 1..20: mol_type = other RNA
gagatccgatctgtggaaac

SEQ ID NO: 2389 - RNA, 20 nt, synthetic construct
  source 1..20: mol_type = other RNA
cactcaccacacagagccat

SEQ ID NO: 2390 - RNA, 20 nt, synthetic construct
  source 1..20: mol_type = other RNA
ttaccagaacctgtctccag

SEQ ID NO: 2391 - RNA, 20 nt, synthetic construct
  source 1..20: mol_type = other RNA
agcagcactaaggagaaaaa

SEQ ID NO: 2392 - RNA, 20 nt, synthetic construct
  source 1..20: mol_type = other RNA
gcagcactaaggagaaaaaa

SEQ ID NO: 2393 - RNA, 20 nt, synthetic construct
  source 1..20: mol_type = other RNA
aggtcctaggaagcaaatac

SEQ ID NO: 2394 - RNA, 20 nt, synthetic construct
  source 1..20: mol_type = other RNA
ggtcctaggaagcaaataca

SEQ ID NO: 2395 - RNA, 20 nt, synthetic construct
  source 1..20: mol_type = other RNA
cagaatctaaagggcagaag

SEQ ID NO: 2396 - RNA, 20 nt, synthetic construct
  source 1..20: mol_type = other RNA
atccagttcagcatgatctc

SEQ ID NO: 2397 - RNA, 20 nt, synthetic construct
  source 1..20: mol_type = other RNA
aatacctcagttgccggtgc

SEQ ID NO: 2398 - RNA, 20 nt, synthetic construct
  source 1..20: mol_type = other RNA
cccactgaccaaatatcaac

SEQ ID NO: 2399 - RNA, 20 nt, synthetic construct
  source 1..20: mol_type = other RNA
tatctaatggtggaccataa

SEQ ID NO: 2400 - RNA, 20 nt, synthetic construct
  source 1..20: mol_type = other RNA
atatcttagatgcctagtca

SEQ ID NO: 2401 - RNA, 20 nt, synthetic construct
  source 1..20: mol_type = other RNA
cagcagattatgcgtctgac

SEQ ID NO: 2402 - RNA, 20 nt, synthetic construct
  source 1..20: mol_type = other RNA
tttcttgcctgaaaaaacaa

SEQ ID NO: 2403 - RNA, 20 nt, synthetic construct
  source 1..20: mol_type = other RNA
cagctatcagtaccatagac

SEQ ID NO: 2404 - RNA, 20 nt, synthetic construct
  source 1..20: mol_type = other RNA
atgatcagtcctttgaaagc

SEQ ID NO: 2405 - RNA, 20 nt, synthetic construct
  source 1..20: mol_type = other RNA
gtcaggcctagaaattggga

SEQ ID NO: 2406 - RNA, 20 nt, synthetic construct
  source 1..20: mol_type = other RNA
aagtcacctgcagagaagga

SEQ ID NO: 2407 - RNA, 20 nt, synthetic construct
  source 1..20: mol_type = other RNA
agtcacctgcagagaaggat

SEQ ID NO: 2408 - RNA, 20 nt, synthetic construct
  source 1..20: mol_type = other RNA
tgggcccacctcgatgatgt

SEQ ID NO: 2409 - RNA, 20 nt, synthetic construct
  source 1..20: mol_type = other RNA
ggaacagagccccctgctgg

SEQ ID NO: 2410 - RNA, 20 nt, synthetic construct
  source 1..20: mol_type = other RNA
caagtaccgacgcgccagcg

SEQ ID NO: 2411 - RNA, 20 nt, synthetic construct
  source 1..20: mol_type = other RNA
agcgcctggggggaaggggc

SEQ ID NO: 2412 - RNA, 20 nt, synthetic construct
  source 1..20: mol_type = other RNA
aatgatgcagagttatagac

SEQ ID NO: 2413 - RNA, 20 nt, synthetic construct
  source 1..20: mol_type = other RNA
cagttgactagacagaaaga

SEQ ID NO: 2414 - RNA, 20 nt, synthetic construct
  source 1..20: mol_type = other RNA
ttgactagacagaaagatgg

SEQ ID NO: 2415 - RNA, 20 nt, synthetic construct
  source 1..20: mol_type = other RNA
tgactagacagaaagatgga

SEQ ID NO: 2416 - RNA, 20 nt, synthetic construct
  source 1..20: mol_type = other RNA
cccagcagccagcactacag

SEQ ID NO: 2417 - RNA, 20 nt, synthetic construct
  source 1..20: mol_type = other RNA
tgcactcaccaacagggctg

SEQ ID NO: 2418 - RNA, 20 nt, synthetic construct
  source 1..20: mol_type = other RNA
ctcaccaacagggctggggc

SEQ ID NO: 2419 - RNA, 20 nt, synthetic construct
  source 1..20: mol_type = other RNA
acctgcgagtcatcacttcc

SEQ ID NO: 2420 - RNA, 20 nt, synthetic construct
  source 1..20: mol_type = other RNA
ctcacctgtgttgtaggcag

SEQ ID NO: 2421 - RNA, 20 nt, synthetic construct
  source 1..20: mol_type = other RNA
tcacctgtgttgtaggcagt

SEQ ID NO: 2422 - RNA, 20 nt, synthetic construct
  source 1..20: mol_type = other RNA
acctcagcaacagtcccacc

SEQ ID NO: 2423 - RNA, 20 nt, synthetic construct
  source 1..20: mol_type = other RNA
cccgggctggaggcaggcaa

SEQ ID NO: 2424 - RNA, 20 nt, synthetic construct
  source 1..20: mol_type = other RNA
atgtctgtgaagagaggaga

SEQ ID NO: 2425 - RNA, 20 nt, synthetic construct
  source 1..20: mol_type = other RNA
tttgcagcgcattggcaagt

SEQ ID NO: 2426 - RNA, 20 nt, synthetic construct
  source 1..20: mol_type = other RNA
tccggcgaatggctgacgca

SEQ ID NO: 2427 - RNA, 20 nt, synthetic construct
  source 1..20: mol_type = other RNA
cgaggacctggaaaacaaag

SEQ ID NO: 2428 - RNA, 20 nt, synthetic construct
  source 1..20: mol_type = other RNA
cacttactggtaatgaaccc

SEQ ID NO: 2429 - RNA, 20 nt, synthetic construct
  source 1..20: mol_type = other RNA
ctccgagtccttgattcatt

SEQ ID NO: 2430 - RNA, 20 nt, synthetic construct
  source 1..20: mol_type = other RNA
cagattccattttccccaag

SEQ ID NO: 2431 - RNA, 20 nt, synthetic construct
  source 1..20: mol_type = other RNA
tcagattccattttccccaa

SEQ ID NO: 2432 - RNA, 20 nt, synthetic construct
  source 1..20: mol_type = other RNA
gaaggccatgcctggaacac

SEQ ID NO: 2433 - RNA, 20 nt, synthetic construct
  source 1..20: mol_type = other RNA
ttaccttggtttctcgaaga

SEQ ID NO: 2434 - RNA, 20 nt, synthetic construct
  source 1..20: mol_type = other RNA
atgcttacctctctcagagt

SEQ ID NO: 2435 - RNA, 20 nt, synthetic construct
  source 1..20: mol_type = other RNA
caacaatcaggaggaagtag

SEQ ID NO: 2436 - RNA, 20 nt, synthetic construct
  source 1..20: mol_type = other RNA
gtggccacatcacttgccca

SEQ ID NO: 2437 - RNA, 20 nt, synthetic construct
  source 1..20: mol_type = other RNA
gcccgggcagtcctgcaagc

SEQ ID NO: 2438 - RNA, 20 nt, synthetic construct
  source 1..20: mol_type = other RNA
gtacctgaagaggaagagaa

SEQ ID NO: 2439 - RNA, 20 nt, synthetic construct
  source 1..20: mol_type = other RNA
ccctgccgggacttcatcaa

SEQ ID NO: 2440 - RNA, 20 nt, synthetic construct
  source 1..20: mol_type = other RNA
ttaccatggcatcgtagcgc

SEQ ID NO: 2441 - RNA, 20 nt, synthetic construct
  source 1..20: mol_type = other RNA
aggccacagcaccgcgccca

SEQ ID NO: 2442 - RNA, 20 nt, synthetic construct
  source 1..20: mol_type = other RNA
cgctcagaaagtgaggggtg

SEQ ID NO: 2443 - RNA, 20 nt, synthetic construct
  source 1..20: mol_type = other RNA
gtagtccaggcctatgcttt

SEQ ID NO: 2444 - RNA, 20 nt, synthetic construct
  source 1..20: mol_type = other RNA
gatctagaagaaagaaaaga

SEQ ID NO: 2445 - RNA, 20 nt, synthetic construct
  source 1..20: mol_type = other RNA
ttaccattgcatcacaaatc

SEQ ID NO: 2446 - RNA, 20 nt, synthetic construct
  source 1..20: mol_type = other RNA
gtgacttaccgcccacctgc

SEQ ID NO: 2447 - RNA, 20 nt, synthetic construct
  source 1..20: mol_type = other RNA
ctcccaggtaattgtgcctg

SEQ ID NO: 2448 - RNA, 20 nt, synthetic construct
  source 1..20: mol_type = other RNA
aggtgaccaagatatcaacg

SEQ ID NO: 2449 - RNA, 20 nt, synthetic construct
  source 1..20: mol_type = other RNA
ggtcggatcaagttttccac

SEQ ID NO: 2450 - RNA, 20 nt, synthetic construct
  source 1..20: mol_type = other RNA
ttatcatcctgaaacaagag

SEQ ID NO: 2451 - RNA, 20 nt, synthetic construct
  source 1..20: mol_type = other RNA
ttcagtctgaaaaagaagag

SEQ ID NO: 2452 - RNA, 20 nt, synthetic construct
  source 1..20: mol_type = other RNA
aaggaacagacgggctctga

SEQ ID NO: 2453 - RNA, 20 nt, synthetic construct
  source 1..20: mol_type = other RNA
gaaattaccttttgcagaag

SEQ ID NO: 2454 - RNA, 20 nt, synthetic construct
  source 1..20: mol_type = other RNA
agaaattaccttttgcagaa

SEQ ID NO: 2455 - RNA, 20 nt, synthetic construct
  source 1..20: mol_type = other RNA
gttgcctgagaaagaaaaag

SEQ ID NO: 2456 - RNA, 20 nt, synthetic construct
  source 1..20: mol_type = other RNA
ctctcccaggcacaagacac

SEQ ID NO: 2457 - RNA, 20 nt, synthetic construct
  source 1..20: mol_type = other RNA
ccgccatgccggccgcgctg

SEQ ID NO: 2458 - RNA, 20 nt, synthetic construct
  source 1..20: mol_type = other RNA
gaagtgaccaagttcactcc

SEQ ID NO: 2459 - RNA, 20 nt, synthetic construct
  source 1..20: mol_type = other RNA
caatccacctgaaagataaa

SEQ ID NO: 2460 - RNA, 20 nt, synthetic construct
  source 1..20: mol_type = other RNA
aatccacctgaaagataaaa

SEQ ID NO: 2461 - RNA, 20 nt, synthetic construct
  source 1..20: mol_type = other RNA
gttatttcagatattcagcc

SEQ ID NO: 2462 - RNA, 20 nt, synthetic construct
  source 1..20: mol_type = other RNA
tgttttcacaaggttgtaat

SEQ ID NO: 2463 - RNA, 20 nt, synthetic construct
  source 1..20: mol_type = other RNA
tggattcagcagtacagttt

SEQ ID NO: 2464 - RNA, 20 nt, synthetic construct
  source 1..20: mol_type = other RNA
aaaacacaggtaagtgtttg

SEQ ID NO: 2465 - RNA, 20 nt, synthetic construct
  source 1..20: mol_type = other RNA
aaacacaggtaagtgtttgc

SEQ ID NO: 2466 - RNA, 20 nt, synthetic construct
  source 1..20: mol_type = other RNA
aacacaggtaagtgtttgcg

SEQ ID NO: 2467 - RNA, 20 nt, synthetic construct
  source 1..20: mol_type = other RNA
tgaacaaatgaagactaaaa

SEQ ID NO: 2468 - RNA, 20 nt, synthetic construct
  source 1..20: mol_type = other RNA
actagagcaggtaaccgggg

SEQ ID NO: 2469 - RNA, 20 nt, synthetic construct
  source 1..20: mol_type = other RNA
atctccggccagtccctgag

SEQ ID NO: 2470 - RNA, 20 nt, synthetic construct
  source 1..20: mol_type = other RNA
gacagatgcagatcaccctg

SEQ ID NO: 2471 - RNA, 20 nt, synthetic construct
  source 1..20: mol_type = other RNA
aggaagtccagacatcggcc

SEQ ID NO: 2472 - RNA, 20 nt, synthetic construct
  source 1..20: mol_type = other RNA
tggattcccaggacagcaca

SEQ ID NO: 2473 - RNA, 20 nt, synthetic construct
  source 1..20: mol_type = other RNA
gcccaccttgttagtttcac

SEQ ID NO: 2474 - RNA, 20 nt, synthetic construct
  source 1..20: mol_type = other RNA
aaaccttcaggagaaggaag

SEQ ID NO: 2475 - RNA, 20 nt, synthetic construct
  source 1..20: mol_type = other RNA
gctgagatctaggagacaaa

SEQ ID NO: 2476 - RNA, 20 nt, synthetic construct
  source 1..20: mol_type = other RNA
gatacagactctcaacagag

SEQ ID NO: 2477 - RNA, 20 nt, synthetic construct
  source 1..20: mol_type = other RNA
ccattcaaggggacccacag

SEQ ID NO: 2478 - RNA, 20 nt, synthetic construct
  source 1..20: mol_type = other RNA
ggggcagtcgcttacagttc

SEQ ID NO: 2479 - RNA, 20 nt, synthetic construct
  source 1..20: mol_type = other RNA
acttaccctctgacttcata

SEQ ID NO: 2480 - RNA, 20 nt, synthetic construct
  source 1..20: mol_type = other RNA
acagagcaaaaaatgaccag

SEQ ID NO: 2481 - RNA, 20 nt, synthetic construct
  source 1..20: mol_type = other RNA
ttacctgtttctccagtagt

SEQ ID NO: 2482 - RNA, 20 nt, synthetic construct
  source 1..20: mol_type = other RNA
acgcctacaattggaaaaca

SEQ ID NO: 2483 - RNA, 20 nt, synthetic construct
  source 1..20: mol_type = other RNA
cgcctacaattggaaaacaa

SEQ ID NO: 2484 - RNA, 20 nt, synthetic construct
  source 1..20: mol_type = other RNA
ttcctgcaggattactttga

SEQ ID NO: 2485 - RNA, 20 nt, synthetic construct
  source 1..20: mol_type = other RNA
tgctgagctgttaataaaac

SEQ ID NO: 2486 - RNA, 20 nt, synthetic construct
  source 1..20: mol_type = other RNA
tcacttacttcatatttctt

SEQ ID NO: 2487 - RNA, 20 nt, synthetic construct
  source 1..20: mol_type = other RNA
ccagccgcagcccctaagtc

SEQ ID NO: 2488 - RNA, 20 nt, synthetic construct
  source 1..20: mol_type = other RNA
tggccgggccaggatgggag

SEQ ID NO: 2489 - RNA, 20 nt, synthetic construct
  source 1..20: mol_type = other RNA
acgggcagctagtgagccag

SEQ ID NO: 2490 - RNA, 20 nt, synthetic construct
  source 1..20: mol_type = other RNA
cgggcagctagtgagccaga

SEQ ID NO: 2491 - RNA, 20 nt, synthetic construct
  source 1..20: mol_type = other RNA
ggcctggcagggatggaggg

SEQ ID NO: 2492 - RNA, 20 nt, synthetic construct
  source 1..20: mol_type = other RNA
catggcctggcagggatgga

SEQ ID NO: 2493 - RNA, 20 nt, synthetic construct
  source 1..20: mol_type = other RNA
ccatggcctggcagggatgg

SEQ ID NO: 2494 - RNA, 20 nt, synthetic construct
  source 1..20: mol_type = other RNA
taacgtcccagttctgattc

SEQ ID NO: 2495 - RNA, 20 nt, synthetic construct
  source 1..20: mol_type = other RNA
gaatcagaactgggacgtta

SEQ ID NO: 2496 - RNA, 20 nt, synthetic construct
  source 1..20: mol_type = other RNA
tgcacctgggggcaggccaa

SEQ ID NO: 2497 - RNA, 20 nt, synthetic construct
  source 1..20: mol_type = other RNA
tcatacctggtggcataggc

SEQ ID NO: 2498 - RNA, 20 nt, synthetic construct
  source 1..20: mol_type = other RNA
cctgctgcagatcttccctg

SEQ ID NO: 2499 - RNA, 20 nt, synthetic construct
  source 1..20: mol_type = other RNA
tacctggagaccagggtggt

SEQ ID NO: 2500 - RNA, 20 nt, synthetic construct
  source 1..20: mol_type = other RNA
ggcgtacctggagaccaggg

SEQ ID NO: 2501 - RNA, 20 nt, synthetic construct
  source 1..20: mol_type = other RNA
cctgatgctgggggtgagag

SEQ ID NO: 2502 - RNA, 20 nt, synthetic construct
  source 1..20: mol_type = other RNA
tcctgatgctgggggtgaga

SEQ ID NO: 2503 - RNA, 20 nt, synthetic construct
  source 1..20: mol_type = other RNA
cggcagtactgcgagctgtg

SEQ ID NO: 2504 - RNA, 20 nt, synthetic construct
  source 1..20: mol_type = other RNA
cggacagcagatcggcgacg

SEQ ID NO: 2505 - RNA, 20 nt, synthetic construct
  source 1..20: mol_type = other RNA
gcttcttccagtcctgacgc

SEQ ID NO: 2506 - RNA, 20 nt, synthetic construct
  source 1..20: mol_type = other RNA
tactaccttgtagcatatgc

SEQ ID NO: 2507 - RNA, 20 nt, synthetic construct
  source 1..20: mol_type = other RNA
atacttcgaatttttccaga

SEQ ID NO: 2508 - RNA, 20 nt, synthetic construct
  source 1..20: mol_type = other RNA
gtcaagcagctgcactgcac

SEQ ID NO: 2509 - RNA, 20 nt, synthetic construct
  source 1..20: mol_type = other RNA
tcaagcagctgcactgcacc

SEQ ID NO: 2510 - RNA, 20 nt, synthetic construct
  source 1..20: mol_type = other RNA
caagcagctgcactgcaccg

SEQ ID NO: 2511 - RNA, 20 nt, synthetic construct
  source 1..20: mol_type = other RNA
gtagctgaaagacacaaaga

SEQ ID NO: 2512 - RNA, 20 nt, synthetic construct
  source 1..20: mol_type = other RNA
tagctgaaagacacaaagaa

SEQ ID NO: 2513 - RNA, 20 nt, synthetic construct
  source 1..20: mol_type = other RNA
ctattacctggttgcgtaag

SEQ ID NO: 2514 - RNA, 20 nt, synthetic construct
  source 1..20: mol_type = other RNA
tattacctggttgcgtaaga

SEQ ID NO: 2515 - RNA, 20 nt, synthetic construct
  source 1..20: mol_type = other RNA
atcctgcggatatttccaga

SEQ ID NO: 2516 - RNA, 20 nt, synthetic construct
  source 1..20: mol_type = other RNA
tcctgcggatatttccagag

SEQ ID NO: 2517 - RNA, 20 nt, synthetic construct
  source 1..20: mol_type = other RNA
tccctgggttggggacagaa

SEQ ID NO: 2518 - RNA, 20 nt, synthetic construct
  source 1..20: mol_type = other RNA
atacctgcttgatggtgctg

SEQ ID NO: 2519 - RNA, 20 nt, synthetic construct
  source 1..20: mol_type = other RNA
ccttggtccagaattccatg

SEQ ID NO: 2520 - RNA, 20 nt, synthetic construct
  source 1..20: mol_type = other RNA
gcagctggagggacagtcac

SEQ ID NO: 2521 - RNA, 20 nt, synthetic construct
  source 1..20: mol_type = other RNA
gcggtgccacagcagctgga

SEQ ID NO: 2522 - RNA, 20 nt, synthetic construct
  source 1..20: mol_type = other RNA
cgcggtgccacagcagctgg

SEQ ID NO: 2523 - RNA, 20 nt, synthetic construct
  source 1..20: mol_type = other RNA
ggcccccaggtttgagccga

SEQ ID NO: 2524 - RNA, 20 nt, synthetic construct
  source 1..20: mol_type = other RNA
aggcccccaggtttgagccg

SEQ ID NO: 2525 - RNA, 20 nt, synthetic construct
  source 1..20: mol_type = other RNA
ctctcctgtggggaggaggg

SEQ ID NO: 2526 - RNA, 20 nt, synthetic construct
  source 1..20: mol_type = other RNA
aagctctcctgtggggagga

SEQ ID NO: 2527 - RNA, 20 nt, synthetic construct
  source 1..20: mol_type = other RNA
ctcacctggaactggcagag

SEQ ID NO: 2528 - RNA, 20 nt, synthetic construct
  source 1..20: mol_type = other RNA
tcacctggaactggcagagc

SEQ ID NO: 2529 - RNA, 20 nt, synthetic construct
  source 1..20: mol_type = other RNA
gatgtactgagacggggtgc

SEQ ID NO: 2530 - RNA, 20 nt, synthetic construct
  source 1..20: mol_type = other RNA
atgtactgagacggggtgca

SEQ ID NO: 2531 - RNA, 20 nt, synthetic construct
  source 1..20: mol_type = other RNA
tctcaccttcttcgcaggaa

SEQ ID NO: 2532 - RNA, 20 nt, synthetic construct
  source 1..20: mol_type = other RNA
ctcaccttcttcgcaggaat

SEQ ID NO: 2533 - RNA, 20 nt, synthetic construct
  source 1..20: mol_type = other RNA
aggctgggggccggggaagc

SEQ ID NO: 2534 - RNA, 20 nt, synthetic construct
  source 1..20: mol_type = other RNA
ccccaccttcatccgctcgt

SEQ ID NO: 2535 - RNA, 20 nt, synthetic construct
  source 1..20: mol_type = other RNA
caccagctgtagaaggtgcc

SEQ ID NO: 2536 - RNA, 20 nt, synthetic construct
  source 1..20: mol_type = other RNA
ccaccagctgtagaaggtgc

SEQ ID NO: 2537 - RNA, 20 nt, synthetic construct
  source 1..20: mol_type = other RNA
gtgcaggccgggcttttcca

SEQ ID NO: 2538 - RNA, 20 nt, synthetic construct
  source 1..20: mol_type = other RNA
gtcctgcagaaggacagggc

SEQ ID NO: 2539 - RNA, 20 nt, synthetic construct
  source 1..20: mol_type = other RNA
ggcagtcctgcagaaggaca

SEQ ID NO: 2540 - RNA, 20 nt, synthetic construct
  source 1..20: mol_type = other RNA
gggcagtcctgcagaaggac

SEQ ID NO: 2541 - RNA, 20 nt, synthetic construct
  source 1..20: mol_type = other RNA
caaggaccagcttaagaccg

SEQ ID NO: 2542 - RNA, 20 nt, synthetic construct
  source 1..20: mol_type = other RNA
acaaggaccagcttaagacc

SEQ ID NO: 2543 - RNA, 20 nt, synthetic construct
  source 1..20: mol_type = other RNA
cactgaccttctccagggcg

SEQ ID NO: 2544 - RNA, 20 nt, synthetic construct
  source 1..20: mol_type = other RNA
ccactgaccttctccagggc

SEQ ID NO: 2545 - RNA, 20 nt, synthetic construct
  source 1..20: mol_type = other RNA
aggcgcatccacagcagctc

SEQ ID NO: 2546 - RNA, 20 nt, synthetic construct
  source 1..20: mol_type = other RNA
tttgttgcagatcttggagc

SEQ ID NO: 2547 - RNA, 20 nt, synthetic construct
  source 1..20: mol_type = other RNA
tgttgcagatcttggagctg

SEQ ID NO: 2548 - RNA, 20 nt, synthetic construct
  source 1..20: mol_type = other RNA
ttgttgcagatcttggagct

SEQ ID NO: 2549 - RNA, 20 nt, synthetic construct
  source 1..20: mol_type = other RNA
agctgctgaggggtgtgggc

SEQ ID NO: 2550 - RNA, 20 nt, synthetic construct
  source 1..20: mol_type = other RNA
ctgcagctgctgaggggtgt

SEQ ID NO: 2551 - RNA, 20 nt, synthetic construct
  source 1..20: mol_type = other RNA
gctgcagctgctgaggggtg

SEQ ID NO: 2552 - RNA, 20 nt, synthetic construct
  source 1..20: mol_type = other RNA
tgtggcccaggtgggtgggg

SEQ ID NO: 2553 - RNA, 20 nt, synthetic construct
  source 1..20: mol_type = other RNA
agagcatctggggggagccg

SEQ ID NO: 2554 - RNA, 20 nt, synthetic construct
  source 1..20: mol_type = other RNA
atcgtccctgcagggaagga

SEQ ID NO: 2555 - RNA, 20 nt, synthetic construct
  source 1..20: mol_type = other RNA
gctaccggaggtgccagaaa

SEQ ID NO: 2556 - RNA, 20 nt, synthetic construct
  source 1..20: mol_type = other RNA
ggagctggaaggtgaaggga

SEQ ID NO: 2557 - RNA, 20 nt, synthetic construct
  source 1..20: mol_type = other RNA
cggagctggaaggtgaaggg

SEQ ID NO: 2558 - RNA, 20 nt, synthetic construct
  source 1..20: mol_type = other RNA
tctcggagctggaaggtgaa

SEQ ID NO: 2559 - RNA, 20 nt, synthetic construct
  source 1..20: mol_type = other RNA
gatgaagcaggtgaggccca

SEQ ID NO: 2560 - RNA, 20 nt, synthetic construct
  source 1..20: mol_type = other RNA
cccctggtgggcagatggga

SEQ ID NO: 2561 - RNA, 20 nt, synthetic construct
  source 1..20: mol_type = other RNA
ccccctggtgggcagatggg

SEQ ID NO: 2562 - RNA, 20 nt, synthetic construct
  source 1..20: mol_type = other RNA
cttccccctggtgggcagat

SEQ ID NO: 2563 - RNA, 20 nt, synthetic construct
  source 1..20: mol_type = other RNA
gcttccccctggtgggcaga

SEQ ID NO: 2564 - RNA, 20 nt, synthetic construct
  source 1..20: mol_type = other RNA
ctcaccagacttcagccagc

SEQ ID NO: 2565 - RNA, 20 nt, synthetic construct
  source 1..20: mol_type = other RNA
tcaccagacttcagccagca

SEQ ID NO: 2566 - RNA, 20 nt, synthetic construct
  source 1..20: mol_type = other RNA
acgctgccaggccagagagc

SEQ ID NO: 2567 - RNA, 20 nt, synthetic construct
  source 1..20: mol_type = other RNA
cacgctgccaggccagagag

SEQ ID NO: 2568 - RNA, 20 nt, synthetic construct
  source 1..20: mol_type = other RNA
gatccacaggggcttcatct

SEQ ID NO: 2569 - RNA, 20 nt, synthetic construct
  source 1..20: mol_type = other RNA
ggtctgtgccaccggccggt

SEQ ID NO: 2570 - RNA, 20 nt, synthetic construct
  source 1..20: mol_type = other RNA
aggtctgtgccaccggccgg

SEQ ID NO: 2571 - RNA, 20 nt, synthetic construct
  source 1..20: mol_type = other RNA
cggaggtctgtgccaccggc

SEQ ID NO: 2572 - RNA, 20 nt, synthetic construct
  source 1..20: mol_type = other RNA
cctgcagatgatccagctca

SEQ ID NO: 2573 - RNA, 20 nt, synthetic construct
  source 1..20: mol_type = other RNA
atcctaggcaagggggaaga

SEQ ID NO: 2574 - RNA, 20 nt, synthetic construct
  source 1..20: mol_type = other RNA
catcctaggcaagggggaag

SEQ ID NO: 2575 - RNA, 20 nt, synthetic construct
  source 1..20: mol_type = other RNA
cctgtacctgcccactctct

SEQ ID NO: 2576 - RNA, 20 nt, synthetic construct
  source 1..20: mol_type = other RNA
gagtgggcaggtacaggggc

SEQ ID NO: 2577 - RNA, 20 nt, synthetic construct
  source 1..20: mol_type = other RNA
aacagctgaggggaggggag

SEQ ID NO: 2578 - RNA, 20 nt, synthetic construct
  source 1..20: mol_type = other RNA
aacctgcaggtaggggacag

SEQ ID NO: 2579 - RNA, 20 nt, synthetic construct
  source 1..20: mol_type = other RNA
gtcctgcaaacaaatcacag

SEQ ID NO: 2580 - RNA, 20 nt, synthetic construct
  source 1..20: mol_type = other RNA
ggttttccagctctcacgga

SEQ ID NO: 2581 - RNA, 20 nt, synthetic construct
  source 1..20: mol_type = other RNA
tggttttccagctctcacgg

SEQ ID NO: 2582 - RNA, 20 nt, synthetic construct
  source 1..20: mol_type = other RNA
ggagaacagcagcctttgag

SEQ ID NO: 2583 - RNA, 20 nt, synthetic construct
  source 1..20: mol_type = other RNA
ctggtccaacttccactcaa

SEQ ID NO: 2584 - RNA, 20 nt, synthetic construct
  source 1..20: mol_type = other RNA
ctggcatccagtattgtttc

SEQ ID NO: 2585 - RNA, 20 nt, synthetic construct
  source 1..20: mol_type = other RNA
aatcaaactataaagaaaat

SEQ ID NO: 2586 - RNA, 20 nt, synthetic construct
  source 1..20: mol_type = other RNA
tcagtttacctatttcgagc

SEQ ID NO: 2587 - RNA, 20 nt, synthetic construct
  source 1..20: mol_type = other RNA
gtgtgcagttaaaagacctg

SEQ ID NO: 2588 - RNA, 20 nt, synthetic construct
  source 1..20: mol_type = other RNA
agggcacaagctatagcaat

SEQ ID NO: 2589 - RNA, 20 nt, synthetic construct
  source 1..20: mol_type = other RNA
tactctgaaaggatgaagac

SEQ ID NO: 2590 - RNA, 20 nt, synthetic construct
  source 1..20: mol_type = other RNA
acagaacagatagctgaaga

SEQ ID NO: 2591 - RNA, 20 nt, synthetic construct
  source 1..20: mol_type = other RNA
aatcttttagtgttgggaag

SEQ ID NO: 2592 - RNA, 20 nt, synthetic construct
  source 1..20: mol_type = other RNA
gaatcttttagtgttgggaa

SEQ ID NO: 2593 - RNA, 20 nt, synthetic construct
  source 1..20: mol_type = other RNA
agaatcttttagtgttggga

SEQ ID NO: 2594 - RNA, 20 nt, synthetic construct
  source 1..20: mol_type = other RNA
ctcctacctttttggtcagc

SEQ ID NO: 2595 - RNA, 20 nt, synthetic construct
  source 1..20: mol_type = other RNA
tcctacctttttggtcagca

SEQ ID NO: 2596 - RNA, 20 nt, synthetic construct
  source 1..20: mol_type = other RNA
gccttacagcaacctctcca

SEQ ID NO: 2597 - RNA, 20 nt, synthetic construct
  source 1..20: mol_type = other RNA
attcttacctgaagcacaat

SEQ ID NO: 2598 - RNA, 20 nt, synthetic construct
  source 1..20: mol_type = other RNA
aagcgtgtctggggaaaaag

SEQ ID NO: 2599 - RNA, 20 nt, synthetic construct
  source 1..20: mol_type = other RNA
gaatcgctagggtttggagg

SEQ ID NO: 2600 - RNA, 20 nt, synthetic construct
  source 1..20: mol_type = other RNA
cgaatcgctagggtttggag

SEQ ID NO: 2601 - RNA, 20 nt, synthetic construct
  source 1..20: mol_type = other RNA
acgaatcgctagggtttgga

SEQ ID NO: 2602 - RNA, 20 nt, synthetic construct
  source 1..20: mol_type = other RNA
aacacctactggattgttac

SEQ ID NO: 2603 - RNA, 20 nt, synthetic construct
  source 1..20: mol_type = other RNA
tggcatccagaacaaggagg

SEQ ID NO: 2604 - RNA, 20 nt, synthetic construct
  source 1..20: mol_type = other RNA
catccagaacaaggaggcgg

SEQ ID NO: 2605 - RNA, 20 nt, synthetic construct
  source 1..20: mol_type = other RNA
cgctactgcaggagatctac

SEQ ID NO: 2606 - RNA, 20 nt, synthetic construct
  source 1..20: mol_type = other RNA
ggtgcagatcatcaagaaga

SEQ ID NO: 2607 - RNA, 20 nt, synthetic construct
  source 1..20: mol_type = other RNA
ccacctgcagagcaaccacc

SEQ ID NO: 2608 - RNA, 20 nt, synthetic construct
  source 1..20: mol_type = other RNA
tcacctgtgtagctgctgga

SEQ ID NO: 2609 - RNA, 20 nt, synthetic construct
  source 1..20: mol_type = other RNA
ctcctcacctgtgtagctgc

SEQ ID NO: 2610 - RNA, 20 nt, synthetic construct
  source 1..20: mol_type = other RNA
gccacaggaggaagcccctg

SEQ ID NO: 2611 - RNA, 20 nt, synthetic construct
  source 1..20: mol_type = other RNA
agaggtctgcggacacacga

SEQ ID NO: 2612 - RNA, 20 nt, synthetic construct
  source 1..20: mol_type = other RNA
caactgcagatgggctgtga

SEQ ID NO: 2613 - RNA, 20 nt, synthetic construct
  source 1..20: mol_type = other RNA
aactgcagatgggctgtgac

SEQ ID NO: 2614 - RNA, 20 nt, synthetic construct
  source 1..20: mol_type = other RNA
agccctgaagcaccaagaac

SEQ ID NO: 2615 - RNA, 20 nt, synthetic construct
  source 1..20: mol_type = other RNA
cttccagaagtgcctggcac

SEQ ID NO: 2616 - RNA, 20 nt, synthetic construct
  source 1..20: mol_type = other RNA
ggatagctgcacagggaagg

SEQ ID NO: 2617 - RNA, 20 nt, synthetic construct
  source 1..20: mol_type = other RNA
cggatagctgcacagggaag

SEQ ID NO: 2618 - RNA, 20 nt, synthetic construct
  source 1..20: mol_type = other RNA
acggatagctgcacagggaa

SEQ ID NO: 2619 - RNA, 20 nt, synthetic construct
  source 1..20: mol_type = other RNA
aacactcaccgccgtgtggc

SEQ ID NO: 2620 - RNA, 20 nt, synthetic construct
  source 1..20: mol_type = other RNA
ctcacctccacacagaatga

SEQ ID NO: 2621 - RNA, 20 nt, synthetic construct
  source 1..20: mol_type = other RNA
gtggcaggcagagaaggggc

SEQ ID NO: 2622 - RNA, 20 nt, synthetic construct
  source 1..20: mol_type = other RNA
ggccggtctgtggggacaca

SEQ ID NO: 2623 - RNA, 20 nt, synthetic construct
  source 1..20: mol_type = other RNA
tggccggtctgtggggacac

SEQ ID NO: 2624 - RNA, 20 nt, synthetic construct
  source 1..20: mol_type = other RNA
cagcttggggaagaggtact

SEQ ID NO: 2625 - RNA, 20 nt, synthetic construct
  source 1..20: mol_type = other RNA
gcagcttggggaagaggtac

SEQ ID NO: 2626 - RNA, 20 nt, synthetic construct
  source 1..20: mol_type = other RNA
tctgctccaggagatctaca

SEQ ID NO: 2627 - RNA, 20 nt, synthetic construct
  source 1..20: mol_type = other RNA
ggtcatggccgccagaccct

SEQ ID NO: 2628 - RNA, 20 nt, synthetic construct
  source 1..20: mol_type = other RNA
gtccagtgtcccagaatgcc

SEQ ID NO: 2629 - RNA, 20 nt, synthetic construct
  source 1..20: mol_type = other RNA
aatcacctctgaacaatccc

SEQ ID NO: 2630 - RNA, 20 nt, synthetic construct
  source 1..20: mol_type = other RNA
cagcctggaagagaaaggaa

SEQ ID NO: 2631 - RNA, 20 nt, synthetic construct
  source 1..20: mol_type = other RNA
gcttacctcttcactgttgg

SEQ ID NO: 2632 - RNA, 20 nt, synthetic construct
  source 1..20: mol_type = other RNA
gaggcttacctcttcactgt

SEQ ID NO: 2633 - RNA, 20 nt, synthetic construct
  source 1..20: mol_type = other RNA
ttgtgctgaaataaagaaaa

SEQ ID NO: 2634 - RNA, 20 nt, synthetic construct
  source 1..20: mol_type = other RNA
tgtgctgaaataaagaaaaa

SEQ ID NO: 2635 - RNA, 20 nt, synthetic construct
  source 1..20: mol_type = other RNA
gtgctgaaataaagaaaaag

SEQ ID NO: 2636 - RNA, 20 nt, synthetic construct
  source 1..20: mol_type = other RNA
ctaccttcagattggagagc

SEQ ID NO: 2637 - RNA, 20 nt, synthetic construct
  source 1..20: mol_type = other RNA
ttgcaaagaaacatggggaa

SEQ ID NO: 2638 - RNA, 20 nt, synthetic construct
  source 1..20: mol_type = other RNA
tgaccgacattccatggcca

SEQ ID NO: 2639 - RNA, 20 nt, synthetic construct
  source 1..20: mol_type = other RNA
tttcactgaaagggagagag

SEQ ID NO: 2640 - RNA, 20 nt, synthetic construct
  source 1..20: mol_type = other RNA
ctttcactgaaagggagaga

SEQ ID NO: 2641 - RNA, 20 nt, synthetic construct
  source 1..20: mol_type = other RNA
tctttcactgaaagggagag

SEQ ID NO: 2642 - RNA, 20 nt, synthetic construct
  source 1..20: mol_type = other RNA
tgttctgtgggcagaggggt

SEQ ID NO: 2643 - RNA, 20 nt, synthetic construct
  source 1..20: mol_type = other RNA
gctgtgttctgtgggcagag

SEQ ID NO: 2644 - RNA, 20 nt, synthetic construct
  source 1..20: mol_type = other RNA
acctcaccttctgtttgtcg

SEQ ID NO: 2645 - RNA, 20 nt, synthetic construct
  source 1..20: mol_type = other RNA
ccacctgggaagggaaggag

SEQ ID NO: 2646 - RNA, 20 nt, synthetic construct
  source 1..20: mol_type = other RNA
accacctgggaagggaagga

SEQ ID NO: 2647 - RNA, 20 nt, synthetic construct
  source 1..20: mol_type = other RNA
caccacctgggaagggaagg

SEQ ID NO: 2648 - RNA, 20 nt, synthetic construct
  source 1..20: mol_type = other RNA
gtcctgtgggaagcagtggc

SEQ ID NO: 2649 - RNA, 20 nt, synthetic construct
  source 1..20: mol_type = other RNA
agttgtcctgtgggaagcag

SEQ ID NO: 2650 - RNA, 20 nt, synthetic construct
  source 1..20: mol_type = other RNA
ctcactgatggggacaaatg

SEQ ID NO: 2651 - RNA, 20 nt, synthetic construct
  source 1..20: mol_type = other RNA
gctcactgatggggacaaat

SEQ ID NO: 2652 - RNA, 20 nt, synthetic construct
  source 1..20: mol_type = other RNA
ggctcactgatggggacaaa

SEQ ID NO: 2653 - RNA, 20 nt, synthetic construct
  source 1..20: mol_type = other RNA
gcacctgaatgtagccctgc

SEQ ID NO: 2654 - RNA, 20 nt, synthetic construct
  source 1..20: mol_type = other RNA
tcacctgtgggcacaagaac

SEQ ID NO: 2655 - RNA, 20 nt, synthetic construct
  source 1..20: mol_type = other RNA
agccctggagcaagatgggg

SEQ ID NO: 2656 - RNA, 20 nt, synthetic construct
  source 1..20: mol_type = other RNA
tagccctggagcaagatggg

SEQ ID NO: 2657 - RNA, 20 nt, synthetic construct
  source 1..20: mol_type = other RNA
gtagccctggagcaagatgg

SEQ ID NO: 2658 - RNA, 20 nt, synthetic construct
  source 1..20: mol_type = other RNA
tgtagccctggagcaagatg

SEQ ID NO: 2659 - RNA, 20 nt, synthetic construct
  source 1..20: mol_type = other RNA
ttgtagccctggagcaagat

SEQ ID NO: 2660 - RNA, 20 nt, synthetic construct
  source 1..20: mol_type = other RNA
cacctggaggaaggggtaca

SEQ ID NO: 2661 - RNA, 20 nt, synthetic construct
  source 1..20: mol_type = other RNA
gcccaccttcctctggtaga

SEQ ID NO: 2662 - RNA, 20 nt, synthetic construct
  source 1..20: mol_type = other RNA
ggagcgggggggagaagcgg

SEQ ID NO: 2663 - RNA, 20 nt, synthetic construct
  source 1..20: mol_type = other RNA
aaacaaaaggagatatcaag

SEQ ID NO: 2664 - RNA, 20 nt, synthetic construct
  source 1..20: mol_type = other RNA
atatctgagtactttagtta

SEQ ID NO: 2665 - RNA, 20 nt, synthetic construct
  source 1..20: mol_type = other RNA
cctacctctgcaattaaatt

SEQ ID NO: 2666 - RNA, 20 nt, synthetic construct
  source 1..20: mol_type = other RNA
ataacttacctttttgtctc

SEQ ID NO: 2667 - RNA, 20 nt, synthetic construct
  source 1..20: mol_type = other RNA
tcgctggcagccgctgtact

SEQ ID NO: 2668 - RNA, 20 nt, synthetic construct
  source 1..20: mol_type = other RNA
actctaaaaagtgaaaatca

SEQ ID NO: 2669 - RNA, 20 nt, synthetic construct
  source 1..20: mol_type = other RNA
aggtgcagcagatgaaacag

SEQ ID NO: 2670 - RNA, 20 nt, synthetic construct
  source 1..20: mol_type = other RNA
accacctgggcggcccaggc

SEQ ID NO: 2671 - RNA, 20 nt, synthetic construct
  source 1..20: mol_type = other RNA
ccacctgggcggcccaggca

SEQ ID NO: 2672 - RNA, 20 nt, synthetic construct
  source 1..20: mol_type = other RNA
cccccaccctgcagggcacc

SEQ ID NO: 2673 - RNA, 20 nt, synthetic construct
  source 1..20: mol_type = other RNA
ccaccctgcagggcaccagg

SEQ ID NO: 2674 - RNA, 20 nt, synthetic construct
  source 1..20: mol_type = other RNA
agccctcacctctcactagt

SEQ ID NO: 2675 - RNA, 20 nt, synthetic construct
  source 1..20: mol_type = other RNA
cacctagagaaggcagcgtc

SEQ ID NO: 2676 - RNA, 20 nt, synthetic construct
  source 1..20: mol_type = other RNA
accctggggggagccaaatt

SEQ ID NO: 2677 - RNA, 20 nt, synthetic construct
  source 1..20: mol_type = other RNA
caaactctgagatgtgggtg

SEQ ID NO: 2678 - RNA, 20 nt, synthetic construct
  source 1..20: mol_type = other RNA
gcaaactctgagatgtgggt

SEQ ID NO: 2679 - RNA, 20 nt, synthetic construct
  source 1..20: mol_type = other RNA
tcaactgggagtgggcggag

SEQ ID NO: 2680 - RNA, 20 nt, synthetic construct
  source 1..20: mol_type = other RNA
actgctgaccttgatgtagt

SEQ ID NO: 2681 - RNA, 20 nt, synthetic construct
  source 1..20: mol_type = other RNA
gctggttctggacgcaagcg

SEQ ID NO: 2682 - RNA, 20 nt, synthetic construct
  source 1..20: mol_type = other RNA
ttgttctggaaagggagggt

SEQ ID NO: 2683 - RNA, 20 nt, synthetic construct
  source 1..20: mol_type = other RNA
tgttctggaaagggagggtc

SEQ ID NO: 2684 - RNA, 20 nt, synthetic construct
  source 1..20: mol_type = other RNA
gccactcacattgtccagcg

SEQ ID NO: 2685 - RNA, 20 nt, synthetic construct
  source 1..20: mol_type = other RNA
ctccctaagccgaggacata

SEQ ID NO: 2686 - RNA, 20 nt, synthetic construct
  source 1..20: mol_type = other RNA
tctccctaagccgaggacat

SEQ ID NO: 2687 - RNA, 20 nt, synthetic construct
  source 1..20: mol_type = other RNA
tcacctgcagtgcacgatga

SEQ ID NO: 2688 - RNA, 20 nt, synthetic construct
  source 1..20: mol_type = other RNA
ccggcgctggggaaagacgg

SEQ ID NO: 2689 - RNA, 20 nt, synthetic construct
  source 1..20: mol_type = other RNA
gccggcgctggggaaagacg

SEQ ID NO: 2690 - RNA, 20 nt, synthetic construct
  source 1..20: mol_type = other RNA
tgccggcgctggggaaagac

SEQ ID NO: 2691 - RNA, 20 nt, synthetic construct
  source 1..20: mol_type = other RNA
cactcacttggacgaggtgc

SEQ ID NO: 2692 - RNA, 20 nt, synthetic construct
  source 1..20: mol_type = other RNA
ccactcacttggacgaggtg

SEQ ID NO: 2693 - RNA, 20 nt, synthetic construct
  source 1..20: mol_type = other RNA
tgtctgcagccgggtgcagg

SEQ ID NO: 2694 - RNA, 20 nt, synthetic construct
  source 1..20: mol_type = other RNA
gtgtctgcagccgggtgcag

SEQ ID NO: 2695 - RNA, 20 nt, synthetic construct
  source 1..20: mol_type = other RNA
tgtgtctgcagccgggtgca

SEQ ID NO: 2696 - RNA, 20 nt, synthetic construct
  source 1..20: mol_type = other RNA
caccgctcacttcctcttga

SEQ ID NO: 2697 - RNA, 20 nt, synthetic construct
  source 1..20: mol_type = other RNA
gcaccgctcacttcctcttg

SEQ ID NO: 2698 - RNA, 20 nt, synthetic construct
  source 1..20: mol_type = other RNA
tttcttctaaaatagtccat

SEQ ID NO: 2699 - RNA, 20 nt, synthetic construct
  source 1..20: mol_type = other RNA
gttactgacctttcagaggt

SEQ ID NO: 2700 - RNA, 20 nt, synthetic construct
  source 1..20: mol_type = other RNA
actacttactctgcacaggg

SEQ ID NO: 2701 - RNA, 20 nt, synthetic construct
  source 1..20: mol_type = other RNA
gacctaaaatataaaaaatt

SEQ ID NO: 2702 - RNA, 20 nt, synthetic construct
  source 1..20: mol_type = other RNA
atttacctgaacctctgaat

SEQ ID NO: 2703 - RNA, 20 nt, synthetic construct
  source 1..20: mol_type = other RNA
cttactgtacaacaagctgc

SEQ ID NO: 2704 - RNA, 20 nt, synthetic construct
  source 1..20: mol_type = other RNA
cgatcctgaaaattgaaaac

SEQ ID NO: 2705 - RNA, 20 nt, synthetic construct
  source 1..20: mol_type = other RNA
cccttaccaggcttgatgag

SEQ ID NO: 2706 - RNA, 20 nt, synthetic construct
  source 1..20: mol_type = other RNA
gatattggctaaatacagaa

SEQ ID NO: 2707 - RNA, 20 nt, synthetic construct
  source 1..20: mol_type = other RNA
ttctgtacctcatcaagaat

SEQ ID NO: 2708 - RNA, 20 nt, synthetic construct
  source 1..20: mol_type = other RNA
ttctcctgcaggatttaaaa

SEQ ID NO: 2709 - RNA, 20 nt, synthetic construct
  source 1..20: mol_type = other RNA
ggtcatctgcaggaaaaaaa

SEQ ID NO: 2710 - RNA, 20 nt, synthetic construct
  source 1..20: mol_type = other RNA
caagaactaaatggggaaat

SEQ ID NO: 2711 - RNA, 20 nt, synthetic construct
  source 1..20: mol_type = other RNA
ggcgagcctgagggcggggc

SEQ ID NO: 2712 - RNA, 20 nt, synthetic construct
  source 1..20: mol_type = other RNA
tggcgagcctgagggcgggg

SEQ ID NO: 2713 - RNA, 20 nt, synthetic construct
  source 1..20: mol_type = other RNA
cctcgcctgtcacgtgcagc

SEQ ID NO: 2714 - RNA, 20 nt, synthetic construct
  source 1..20: mol_type = other RNA
gcgcgccagatggccgtcag

SEQ ID NO: 2715 - RNA, 20 nt, synthetic construct
  source 1..20: mol_type = other RNA
tgcatggaccagcgctgcgc

SEQ ID NO: 2716 - RNA, 20 nt, synthetic construct
  source 1..20: mol_type = other RNA
gtccatgcaggtgccacccg

SEQ ID NO: 2717 - RNA, 20 nt, synthetic construct
  source 1..20: mol_type = other RNA
agcgcagcgctggtccatgc

SEQ ID NO: 2718 - RNA, 20 nt, synthetic construct
  source 1..20: mol_type = other RNA
cgcacccacctgggcggcgg

SEQ ID NO: 2719 - RNA, 20 nt, synthetic construct
  source 1..20: mol_type = other RNA
cgcggctgcaggggagaagg

SEQ ID NO: 2720 - RNA, 20 nt, synthetic construct
  source 1..20: mol_type = other RNA
gcacccacctgggcggcggc

SEQ ID NO: 2721 - RNA, 20 nt, synthetic construct
  source 1..20: mol_type = other RNA
cggcgcggctgcaggggaga

SEQ ID NO: 2722 - RNA, 20 nt, synthetic construct
  source 1..20: mol_type = other RNA
gcggctgcaggggagaaggc

SEQ ID NO: 2723 - RNA, 20 nt, synthetic construct
  source 1..20: mol_type = other RNA
gggccggaccaggcgagggc

SEQ ID NO: 2724 - RNA, 20 nt, synthetic construct
  source 1..20: mol_type = other RNA
ccggaccaggcgagggcggg

SEQ ID NO: 2725 - RNA, 20 nt, synthetic construct
  source 1..20: mol_type = other RNA
atttgagccagatgaacccc

SEQ ID NO: 2726 - RNA, 20 nt, synthetic construct
  source 1..20: mol_type = other RNA
ttaccctccgggttgggcag

SEQ ID NO: 2727 - RNA, 20 nt, synthetic construct
  source 1..20: mol_type = other RNA
cttaccctccgggttgggca

SEQ ID NO: 2728 - RNA, 20 nt, synthetic construct
  source 1..20: mol_type = other RNA
gtcctggggaaacaaaggca

SEQ ID NO: 2729 - RNA, 20 nt, synthetic construct
  source 1..20: mol_type = other RNA
atccagtcctggggaaacaa

SEQ ID NO: 2730 - RNA, 20 nt, synthetic construct
  source 1..20: mol_type = other RNA
tactcacccatggtaaactc

SEQ ID NO: 2731 - RNA, 20 nt, synthetic construct
  source 1..20: mol_type = other RNA
taaaaccctgcaggaggtgg

SEQ ID NO: 2732 - RNA, 20 nt, synthetic construct
  source 1..20: mol_type = other RNA
agtctgtgggccagaagaaa

SEQ ID NO: 2733 - RNA, 20 nt, synthetic construct
  source 1..20: mol_type = other RNA
actcacctgtgagctgccaa

SEQ ID NO: 2734 - RNA, 20 nt, synthetic construct
  source 1..20: mol_type = other RNA
gctgccaaaggatatagatg

SEQ ID NO: 2735 - RNA, 20 nt, synthetic construct
  source 1..20: mol_type = other RNA
ctgccaaaggatatagatga

SEQ ID NO: 2736 - RNA, 20 nt, synthetic construct
  source 1..20: mol_type = other RNA
gtcaccttcacagagcttcc

SEQ ID NO: 2737 - RNA, 20 nt, synthetic construct
  source 1..20: mol_type = other RNA
cagcaccttcagagaatggg

SEQ ID NO: 2738 - RNA, 20 nt, synthetic construct
  source 1..20: mol_type = other RNA
caccttcagagaatgggtgg

SEQ ID NO: 2739 - RNA, 20 nt, synthetic construct
  source 1..20: mol_type = other RNA
atgtactctaaaagcaagtt

SEQ ID NO: 2740 - RNA, 20 nt, synthetic construct
  source 1..20: mol_type = other RNA
aatgtactctaaaagcaagt

SEQ ID NO: 2741 - RNA, 20 nt, synthetic construct
  source 1..20: mol_type = other RNA
cgctgcgccagcgccgcgtg

SEQ ID NO: 2742 - RNA, 20 nt, synthetic construct
  source 1..20: mol_type = other RNA
gggcccccagtagaatccgc

SEQ ID NO: 2743 - RNA, 20 nt, synthetic construct
  source 1..20: mol_type = other RNA
cttacctacctcccaatgtc

SEQ ID NO: 2744 - RNA, 20 nt, synthetic construct
  source 1..20: mol_type = other RNA
ctgcatctacagtaatctga

SEQ ID NO: 2745 - RNA, 20 nt, synthetic construct
  source 1..20: mol_type = other RNA
atggtatcctaaaatagaaa

SEQ ID NO: 2746 - RNA, 20 nt, synthetic construct
  source 1..20: mol_type = other RNA
tcatacctgcaggagctgag

SEQ ID NO: 2747 - RNA, 20 nt, synthetic construct
  source 1..20: mol_type = other RNA
taagctagaagagaagtgga

SEQ ID NO: 2748 - RNA, 20 nt, synthetic construct
  source 1..20: mol_type = other RNA
ctcttaagctagaagagaag

SEQ ID NO: 2749 - RNA, 20 nt, synthetic construct
  source 1..20: mol_type = other RNA
gctgcagcctggatcaagcg

SEQ ID NO: 2750 - RNA, 20 nt, synthetic construct
  source 1..20: mol_type = other RNA
gctgcaggacctgtgccgcc

SEQ ID NO: 2751 - RNA, 20 nt, synthetic construct
  source 1..20: mol_type = other RNA
ttcctgttgggggtgggtag

SEQ ID NO: 2752 - RNA, 20 nt, synthetic construct
  source 1..20: mol_type = other RNA
gttcctgttgggggtgggta

SEQ ID NO: 2753 - RNA, 20 nt, synthetic construct
  source 1..20: mol_type = other RNA
tgttcctgttgggggtgggt

SEQ ID NO: 2754 - RNA, 20 nt, synthetic construct
  source 1..20: mol_type = other RNA
acaggaacaggaatattacc

SEQ ID NO: 2755 - RNA, 20 nt, synthetic construct
  source 1..20: mol_type = other RNA
gatatccacgccatttcacc

SEQ ID NO: 2756 - RNA, 20 nt, synthetic construct
  source 1..20: mol_type = other RNA
actcacgtgagcaccgggat

SEQ ID NO: 2757 - RNA, 20 nt, synthetic construct
  source 1..20: mol_type = other RNA
gactcacgtgagcaccggga

SEQ ID NO: 2758 - RNA, 20 nt, synthetic construct
  source 1..20: mol_type = other RNA
cacctgtgaggaaaaggacg

SEQ ID NO: 2759 - RNA, 20 nt, synthetic construct
  source 1..20: mol_type = other RNA
ccacctgtgaggaaaaggac

SEQ ID NO: 2760 - RNA, 20 nt, synthetic construct
  source 1..20: mol_type = other RNA
gactcactgagacaaagtag

SEQ ID NO: 2761 - RNA, 20 nt, synthetic construct
  source 1..20: mol_type = other RNA
accacctgtgaggaaaagga

SEQ ID NO: 2762 - RNA, 20 nt, synthetic construct
  source 1..20: mol_type = other RNA
ggactcactgagacaaagta

SEQ ID NO: 2763 - RNA, 20 nt, synthetic construct
  source 1..20: mol_type = other RNA
gggactcactgagacaaagt

SEQ ID NO: 2764 - RNA, 20 nt, synthetic construct
  source 1..20: mol_type = other RNA
ttacttggcaggctttccaa

SEQ ID NO: 2765 - RNA, 20 nt, synthetic construct
  source 1..20: mol_type = other RNA
cagtacctggggggagagaa

SEQ ID NO: 2766 - RNA, 20 nt, synthetic construct
  source 1..20: mol_type = other RNA
ccagtacctggggggagaga

SEQ ID NO: 2767 - RNA, 20 nt, synthetic construct
  source 1..20: mol_type = other RNA
ttgtgctggaggcaccagaa

SEQ ID NO: 2768 - RNA, 20 nt, synthetic construct
  source 1..20: mol_type = other RNA
attgtgctggaggcaccaga

SEQ ID NO: 2769 - RNA, 20 nt, synthetic construct
  source 1..20: mol_type = other RNA
cccaacgctgacagagagaa

SEQ ID NO: 2770 - RNA, 20 nt, synthetic construct
  source 1..20: mol_type = other RNA
gtcacctgaggacagaaagg

SEQ ID NO: 2771 - RNA, 20 nt, synthetic construct
  source 1..20: mol_type = other RNA
gccgtcacctgaggacagaa

SEQ ID NO: 2772 - RNA, 20 nt, synthetic construct
  source 1..20: mol_type = other RNA
ttccagttctaaggggagcg

SEQ ID NO: 2773 - RNA, 20 nt, synthetic construct
  source 1..20: mol_type = other RNA
tcacctgaaatgacaatgat

SEQ ID NO: 2774 - RNA, 20 nt, synthetic construct
  source 1..20: mol_type = other RNA
catccaacctgaagaccaaa

SEQ ID NO: 2775 - RNA, 20 nt, synthetic construct
  source 1..20: mol_type = other RNA
gatctctgagtggaaagaac

SEQ ID NO: 2776 - RNA, 20 nt, synthetic construct
  source 1..20: mol_type = other RNA
aggacgcgcatccccggggc

SEQ ID NO: 2777 - RNA, 20 nt, synthetic construct
  source 1..20: mol_type = other RNA
tcccacaggtaagcgggtga

SEQ ID NO: 2778 - RNA, 20 nt, synthetic construct
  source 1..20: mol_type = other RNA
ggcgctacgagccttcccac

SEQ ID NO: 2779 - RNA, 20 nt, synthetic construct
  source 1..20: mol_type = other RNA
cccactcacccatggggcag

SEQ ID NO: 2780 - RNA, 20 nt, synthetic construct
  source 1..20: mol_type = other RNA
cgacacagcagtgcccacag

SEQ ID NO: 2781 - RNA, 20 nt, synthetic construct
  source 1..20: mol_type = other RNA
gtcgtctaagggacacagac

SEQ ID NO: 2782 - RNA, 20 nt, synthetic construct
  source 1..20: mol_type = other RNA
tcgtctaagggacacagaca

SEQ ID NO: 2783 - RNA, 20 nt, synthetic construct
  source 1..20: mol_type = other RNA
cgtctaagggacacagacag

SEQ ID NO: 2784 - RNA, 20 nt, synthetic construct
  source 1..20: mol_type = other RNA
cccccaggccaagcccaccc

SEQ ID NO: 2785 - RNA, 20 nt, synthetic construct
  source 1..20: mol_type = other RNA
aaattacctggatctgaact

SEQ ID NO: 2786 - RNA, 20 nt, synthetic construct
  source 1..20: mol_type = other RNA
tcatctaagggacacagatg

SEQ ID NO: 2787 - RNA, 20 nt, synthetic construct
  source 1..20: mol_type = other RNA
gtgctgcggggagaagccca

SEQ ID NO: 2788 - RNA, 20 nt, synthetic construct
  source 1..20: mol_type = other RNA
accattacctgcatccagaa

SEQ ID NO: 2789 - RNA, 20 nt, synthetic construct
  source 1..20: mol_type = other RNA
ccattacctgcatccagaac

SEQ ID NO: 2790 - RNA, 20 nt, synthetic construct
  source 1..20: mol_type = other RNA
ccccactcagagcttgctgg

SEQ ID NO: 2791 - RNA, 20 nt, synthetic construct
  source 1..20: mol_type = other RNA
acccagaagagcactggccc

SEQ ID NO: 2792 - RNA, 20 nt, synthetic construct
  source 1..20: mol_type = other RNA
aggatcacccagaagagcac

SEQ ID NO: 2793 - RNA, 20 nt, synthetic construct
  source 1..20: mol_type = other RNA
tggagctctgaaacgacacc

SEQ ID NO: 2794 - RNA, 20 nt, synthetic construct
  source 1..20: mol_type = other RNA
agctctgaaacgacaccagg

SEQ ID NO: 2795 - RNA, 20 nt, synthetic construct
  source 1..20: mol_type = other RNA
ctcacccacaagctctagct

SEQ ID NO: 2796 - RNA, 20 nt, synthetic construct
  source 1..20: mol_type = other RNA
tcacccacaagctctagctt

SEQ ID NO: 2797 - RNA, 20 nt, synthetic construct
  source 1..20: mol_type = other RNA
acttaccgttgagctcctcc

SEQ ID NO: 2798 - RNA, 20 nt, synthetic construct
  source 1..20: mol_type = other RNA
cttaccgttgagctcctcct

SEQ ID NO: 2799 - RNA, 20 nt, synthetic construct
  source 1..20: mol_type = other RNA
agctgctgtgggacgggaat

SEQ ID NO: 2800 - RNA, 20 nt, synthetic construct
  source 1..20: mol_type = other RNA
cagctgctgtgggacgggaa

SEQ ID NO: 2801 - RNA, 20 nt, synthetic construct
  source 1..20: mol_type = other RNA
ctcctcagctgctgtgggac

SEQ ID NO: 2802 - RNA, 20 nt, synthetic construct
  source 1..20: mol_type = other RNA
gccgctgcaggatgccagcc

SEQ ID NO: 2803 - RNA, 20 nt, synthetic construct
  source 1..20: mol_type = other RNA
tgactcaccaatcttgttat

SEQ ID NO: 2804 - RNA, 20 nt, synthetic construct
  source 1..20: mol_type = other RNA
tctctgcaaggcaaaaggat

SEQ ID NO: 2805 - RNA, 20 nt, synthetic construct
  source 1..20: mol_type = other RNA
ttctctgcaaggcaaaagga

SEQ ID NO: 2806 - RNA, 20 nt, synthetic construct
  source 1..20: mol_type = other RNA
actcaccaacagcaggaccg

SEQ ID NO: 2807 - RNA, 20 nt, synthetic construct
  source 1..20: mol_type = other RNA
gagacctgtggggacaaagc

SEQ ID NO: 2808 - RNA, 20 nt, synthetic construct
  source 1..20: mol_type = other RNA
ctcaccctgtgcggcacttc

SEQ ID NO: 2809 - RNA, 20 nt, synthetic construct
  source 1..20: mol_type = other RNA
acacctgggtacacacacag

SEQ ID NO: 2810 - RNA, 20 nt, synthetic construct
  source 1..20: mol_type = other RNA
tgagctctggaaaaagacat

SEQ ID NO: 2811 - RNA, 20 nt, synthetic construct
  source 1..20: mol_type = other RNA
ccggttcctgtaacacatag

SEQ ID NO: 2812 - RNA, 20 nt, synthetic construct
  source 1..20: mol_type = other RNA
cggttcctgtaacacatagt

SEQ ID NO: 2813 - RNA, 20 nt, synthetic construct
  source 1..20: mol_type = other RNA
gttcaccttgttgcaatagt

SEQ ID NO: 2814 - RNA, 20 nt, synthetic construct
  source 1..20: mol_type = other RNA
ttcaccttgttgcaatagta

SEQ ID NO: 2815 - RNA, 20 nt, synthetic construct
  source 1..20: mol_type = other RNA
tcaccttgttgcaatagtag

SEQ ID NO: 2816 - RNA, 20 nt, synthetic construct
  source 1..20: mol_type = other RNA
tcacagctaagtgctcaact

SEQ ID NO: 2817 - RNA, 20 nt, synthetic construct
  source 1..20: mol_type = other RNA
tgatactcaggccgccatca

SEQ ID NO: 2818 - RNA, 20 nt, synthetic construct
  source 1..20: mol_type = other RNA
gatactcaggccgccatcaa

SEQ ID NO: 2819 - RNA, 20 nt, synthetic construct
  source 1..20: mol_type = other RNA
gagaagagcaaaaacaggta

SEQ ID NO: 2820 - RNA, 20 nt, synthetic construct
  source 1..20: mol_type = other RNA
agaagagcaaaaacaggtaa

SEQ ID NO: 2821 - RNA, 20 nt, synthetic construct
  source 1..20: mol_type = other RNA
cgttaccttggatacaaggc

SEQ ID NO: 2822 - RNA, 20 nt, synthetic construct
  source 1..20: mol_type = other RNA
tcaccatgcagcagcccctt

SEQ ID NO: 2823 - RNA, 20 nt, synthetic construct
  source 1..20: mol_type = other RNA
tgggaaccagctccccatgc

SEQ ID NO: 2824 - RNA, 20 nt, synthetic construct
  source 1..20: mol_type = other RNA
catgcagcaagtaagtgcaa

SEQ ID NO: 2825 - RNA, 20 nt, synthetic construct
  source 1..20: mol_type = other RNA
tgcacttacttgctgcatgg

SEQ ID NO: 2826 - RNA, 20 nt, synthetic construct
  source 1..20: mol_type = other RNA
gcacttacttgctgcatggt

SEQ ID NO: 2827 - RNA, 20 nt, synthetic construct
  source 1..20: mol_type = other RNA
agctgcacaagttgtcaccc

SEQ ID NO: 2828 - RNA, 20 nt, synthetic construct
  source 1..20: mol_type = other RNA
ctcccccacaaccggtggac

SEQ ID NO: 2829 - RNA, 20 nt, synthetic construct
  source 1..20: mol_type = other RNA
ttattccagtccaccggttg

SEQ ID NO: 2830 - RNA, 20 nt, synthetic construct
  source 1..20: mol_type = other RNA
tattccagtccaccggttgt

SEQ ID NO: 2831 - RNA, 20 nt, synthetic construct
  source 1..20: mol_type = other RNA
attccagtccaccggttgtg

SEQ ID NO: 2832 - RNA, 20 nt, synthetic construct
  source 1..20: mol_type = other RNA
ttccagtccaccggttgtgg

SEQ ID NO: 2833 - RNA, 20 nt, synthetic construct
  source 1..20: mol_type = other RNA
gtccatggcgggcgcggcgg

SEQ ID NO: 2834 - RNA, 20 nt, synthetic construct
  source 1..20: mol_type = other RNA
gacgtccatggcgggcgcgg

SEQ ID NO: 2835 - RNA, 20 nt, synthetic construct
  source 1..20: mol_type = other RNA
tatgcagcagactcgcacag

SEQ ID NO: 2836 - RNA, 20 nt, synthetic construct
  source 1..20: mol_type = other RNA
tttccgcagaaggtaagcag

SEQ ID NO: 2837 - RNA, 20 nt, synthetic construct
  source 1..20: mol_type = other RNA
tcaaactagaatagagagag

SEQ ID NO: 2838 - RNA, 20 nt, synthetic construct
  source 1..20: mol_type = other RNA
caaactagaatagagagaga

SEQ ID NO: 2839 - RNA, 20 nt, synthetic construct
  source 1..20: mol_type = other RNA
cacccacctggctggttgac

SEQ ID NO: 2840 - RNA, 20 nt, synthetic construct
  source 1..20: mol_type = other RNA
tggatctaagagaggaggac

SEQ ID NO: 2841 - RNA, 20 nt, synthetic construct
  source 1..20: mol_type = other RNA
gatccaggagatggtccact

SEQ ID NO: 2842 - RNA, 20 nt, synthetic construct
  source 1..20: mol_type = other RNA
gtcccagctcatctcgcaga

SEQ ID NO: 2843 - RNA, 20 nt, synthetic construct
  source 1..20: mol_type = other RNA
tcatctcgcagatgggcatc

SEQ ID NO: 2844 - RNA, 20 nt, synthetic construct
  source 1..20: mol_type = other RNA
ctccactcaggaagaggagt

SEQ ID NO: 2845 - RNA, 20 nt, synthetic construct
  source 1..20: mol_type = other RNA
tgagccgcagaagcctgtgt

SEQ ID NO: 2846 - RNA, 20 nt, synthetic construct
  source 1..20: mol_type = other RNA
agacactcaggccgccatca

SEQ ID NO: 2847 - RNA, 20 nt, synthetic construct
  source 1..20: mol_type = other RNA
gacactcaggccgccatcaa

SEQ ID NO: 2848 - RNA, 20 nt, synthetic construct
  source 1..20: mol_type = other RNA
gacctgcaggccttccgcag

SEQ ID NO: 2849 - RNA, 20 nt, synthetic construct
  source 1..20: mol_type = other RNA
acctgcaggccttccgcagt

SEQ ID NO: 2850 - RNA, 20 nt, synthetic construct
  source 1..20: mol_type = other RNA
cctgcaggccttccgcagtg

SEQ ID NO: 2851 - RNA, 20 nt, synthetic construct
  source 1..20: mol_type = other RNA
ctgcttacctgtggccctgg

SEQ ID NO: 2852 - RNA, 20 nt, synthetic construct
  source 1..20: mol_type = other RNA
ggaagtcctacagagtggga

SEQ ID NO: 2853 - RNA, 20 nt, synthetic construct
  source 1..20: mol_type = other RNA
agtcctacagagtgggaagg

SEQ ID NO: 2854 - RNA, 20 nt, synthetic construct
  source 1..20: mol_type = other RNA
gtcccagtccccgctgctgg

SEQ ID NO: 2855 - RNA, 20 nt, synthetic construct
  source 1..20: mol_type = other RNA
tcccagtccccgctgctggt

SEQ ID NO: 2856 - RNA, 20 nt, synthetic construct
  source 1..20: mol_type = other RNA
gctgtcccagtccccgctgc

SEQ ID NO: 2857 - RNA, 20 nt, synthetic construct
  source 1..20: mol_type = other RNA
caggctgtgagagagaggag

SEQ ID NO: 2858 - RNA, 20 nt, synthetic construct
  source 1..20: mol_type = other RNA
gcaggctgtgagagagagga

SEQ ID NO: 2859 - RNA, 20 nt, synthetic construct
  source 1..20: mol_type = other RNA
agcaggctgtgagagagagg

SEQ ID NO: 2860 - RNA, 20 nt, synthetic construct
  source 1..20: mol_type = other RNA
tgccatctcttcctgccctt

SEQ ID NO: 2861 - RNA, 20 nt, synthetic construct
  source 1..20: mol_type = other RNA
gtactcacgcggtgtgcacc

SEQ ID NO: 2862 - RNA, 20 nt, synthetic construct
  source 1..20: mol_type = other RNA
ggaagtgcctgggtgaggac

SEQ ID NO: 2863 - RNA, 20 nt, synthetic construct
  source 1..20: mol_type = other RNA
agggtctagaaaagaggcaa

SEQ ID NO: 2864 - RNA, 20 nt, synthetic construct
  source 1..20: mol_type = other RNA
gggtctagaaaagaggcaaa

SEQ ID NO: 2865 - RNA, 20 nt, synthetic construct
  source 1..20: mol_type = other RNA
ggtctagaaaagaggcaaag

SEQ ID NO: 2866 - RNA, 20 nt, synthetic construct
  source 1..20: mol_type = other RNA
ggtagcctggggggtggggc

SEQ ID NO: 2867 - RNA, 20 nt, synthetic construct
  source 1..20: mol_type = other RNA
cccctggaaaatagtgaaaa

SEQ ID NO: 2868 - RNA, 20 nt, synthetic construct
  source 1..20: mol_type = other RNA
ctgaccttccaggatgagtt

SEQ ID NO: 2869 - RNA, 20 nt, synthetic construct
  source 1..20: mol_type = other RNA
gaggttctcactgaccttcc

SEQ ID NO: 2870 - RNA, 20 nt, synthetic construct
  source 1..20: mol_type = other RNA
gcgggcctggaaggatgaga

SEQ ID NO: 2871 - RNA, 20 nt, synthetic construct
  source 1..20: mol_type = other RNA
gcgtacctttctcacgagtt

SEQ ID NO: 2872 - RNA, 20 nt, synthetic construct
  source 1..20: mol_type = other RNA
cgcgtacctttctcacgagt

SEQ ID NO: 2873 - RNA, 20 nt, synthetic construct
  source 1..20: mol_type = other RNA
ggcccgtacctcggtagctg

SEQ ID NO: 2874 - RNA, 20 nt, synthetic construct
  source 1..20: mol_type = other RNA
gtcccagttctccgccctcc

SEQ ID NO: 2875 - RNA, 20 nt, synthetic construct
  source 1..20: mol_type = other RNA
ggaacaagccagggtcatgt

SEQ ID NO: 2876 - RNA, 20 nt, synthetic construct
  source 1..20: mol_type = other RNA
caacccctccatctcccagc

SEQ ID NO: 2877 - RNA, 20 nt, synthetic construct
  source 1..20: mol_type = other RNA
tgacctatcgggacaagcaa

SEQ ID NO: 2878 - RNA, 20 nt, synthetic construct
  source 1..20: mol_type = other RNA
agtacctggcagtgtgatat

SEQ ID NO: 2879 - RNA, 20 nt, synthetic construct
  source 1..20: mol_type = other RNA
atgtgcagaaagacctggag

SEQ ID NO: 2880 - RNA, 20 nt, synthetic construct
  source 1..20: mol_type = other RNA
gggcagcccgcctccgccgc

SEQ ID NO: 2881 - RNA, 20 nt, synthetic construct
  source 1..20: mol_type = other RNA
cctacctgtcaccaggacca

SEQ ID NO: 2882 - RNA, 20 nt, synthetic construct
  source 1..20: mol_type = other RNA
ctcttacctgtaccataacc

SEQ ID NO: 2883 - RNA, 20 nt, synthetic construct
  source 1..20: mol_type = other RNA
actcacgctggatagcctcc

SEQ ID NO: 2884 - RNA, 20 nt, synthetic construct
  source 1..20: mol_type = other RNA
cactcaccttagcctgagca

SEQ ID NO: 2885 - RNA, 20 nt, synthetic construct
  source 1..20: mol_type = other RNA
cttaccccacttaactatct

SEQ ID NO: 2886 - RNA, 20 nt, synthetic construct
  source 1..20: mol_type = other RNA
ccctacctgtcaccaggacc

SEQ ID NO: 2887 - RNA, 20 nt, synthetic construct
  source 1..20: mol_type = other RNA
attatacctgccatgccgta

SEQ ID NO: 2888 - RNA, 21 nt, synthetic construct
  source 1..21: mol_type = other RNA
gcagagcactggaattcgtca

SEQ ID NO: 2889 - RNA, 20 nt, synthetic construct
  source 1..20: mol_type = other RNA
tcgatctatgaaaaagacag

SEQ ID NO: 2890 - RNA, 20 nt, synthetic construct
  source 1..20: mol_type = other RNA
ccttacctagggacgcagcc

SEQ ID NO: 2891 - RNA, 20 nt, synthetic construct
  source 1..20: mol_type = other RNA
ggatccccagcgccagctgc

SEQ ID NO: 2892 - RNA, 20 nt, synthetic construct
  source 1..20: mol_type = other RNA
agcgccagctgccggcctcc

SEQ ID NO: 2893 - RNA, 20 nt, synthetic construct
  source 1..20: mol_type = other RNA
gcgccagctgccggcctcca

SEQ ID NO: 2894 - RNA, 20 nt, synthetic construct
  source 1..20: mol_type = other RNA
cctggctcagcgccacgggc

SEQ ID NO: 2895 - RNA, 20 nt, synthetic construct
  source 1..20: mol_type = other RNA
gctgcaggtgcagacaggtg

SEQ ID NO: 2896 - RNA, 20 nt, synthetic construct
  source 1..20: mol_type = other RNA
gcggtaccacgtcttgtaga

SEQ ID NO: 2897 - RNA, 20 nt, synthetic construct
  source 1..20: mol_type = other RNA
tgcctgtgggaacaaacaga

SEQ ID NO: 2898 - RNA, 20 nt, synthetic construct
  source 1..20: mol_type = other RNA
cttactttcactatcctggg

SEQ ID NO: 2899 - RNA, 20 nt, synthetic construct
  source 1..20: mol_type = other RNA
tcccttactttcactatcct

SEQ ID NO: 2900 - RNA, 20 nt, synthetic construct
  source 1..20: mol_type = other RNA
ctcccaggatagtgaaagta

SEQ ID NO: 2901 - RNA, 20 nt, synthetic construct
  source 1..20: mol_type = other RNA
tgatgtctgaaagggcagag

SEQ ID NO: 2902 - RNA, 20 nt, synthetic construct
  source 1..20: mol_type = other RNA
tgcccaggagctggtgcgga

SEQ ID NO: 2903 - RNA, 20 nt, synthetic construct
  source 1..20: mol_type = other RNA
ttgctgccacagaaccagaa

SEQ ID NO: 2904 - RNA, 20 nt, synthetic construct
  source 1..20: mol_type = other RNA
attcaagggattgaaaaccc

SEQ ID NO: 2905 - RNA, 20 nt, synthetic construct
  source 1..20: mol_type = other RNA
acctgcccaggggatacccg

SEQ ID NO: 2906 - RNA, 20 nt, synthetic construct
  source 1..20: mol_type = other RNA
cagcggcagccttctgagtc

SEQ ID NO: 2907 - RNA, 20 nt, synthetic construct
  source 1..20: mol_type = other RNA
gctacaaacaagctcatctt

SEQ ID NO: 2908 - RNA, 20 nt, synthetic construct
  source 1..20: mol_type = other RNA
ccagccaagtacgtaagtag

SEQ ID NO: 2909 - RNA, 20 nt, synthetic construct
  source 1..20: mol_type = other RNA
ctggatatctgtgggacaag

SEQ ID NO: 2910 - RNA, 20 nt, synthetic construct
  source 1..20: mol_type = other RNA
ggaccctgcatagagagaga

SEQ ID NO: 2911 - RNA, 20 nt, synthetic construct
  source 1..20: mol_type = other RNA
tgccccagcagacgggcacg

SEQ ID NO: 2912 - RNA, 20 nt, synthetic construct
  source 1..20: mol_type = other RNA
gttacctgggccatgtcccc

SEQ ID NO: 2913 - RNA, 20 nt, synthetic construct
  source 1..20: mol_type = other RNA
cttactgttagatttatatc

SEQ ID NO: 2914 - RNA, 20 nt, synthetic construct
  source 1..20: mol_type = other RNA
ttactgttagatttatatca

SEQ ID NO: 2915 - RNA, 20 nt, synthetic construct
  source 1..20: mol_type = other RNA
tttgctatggaaacacaaac

SEQ ID NO: 2916 - RNA, 20 nt, synthetic construct
  source 1..20: mol_type = other RNA
tccatagcaaatatccacat

SEQ ID NO: 2917 - RNA, 20 nt, synthetic construct
  source 1..20: mol_type = other RNA
gcagcaaccctcacaacctt

SEQ ID NO: 2918 - RNA, 20 nt, synthetic construct
  source 1..20: mol_type = other RNA
cagcaaccctcacaaccttt

SEQ ID NO: 2919 - RNA, 20 nt, synthetic construct
  source 1..20: mol_type = other RNA
aggcaggctcccctcgcctc

SEQ ID NO: 2920 - RNA, 20 nt, synthetic construct
  source 1..20: mol_type = other RNA
ggagcagcaggaccagcttc

SEQ ID NO: 2921 - RNA, 20 nt, synthetic construct
  source 1..20: mol_type = other RNA
caggaatacctgagctttct

SEQ ID NO: 2922 - RNA, 20 nt, synthetic construct
  source 1..20: mol_type = other RNA
aggttccagattccattgct

SEQ ID NO: 2923 - RNA, 20 nt, synthetic construct
  source 1..20: mol_type = other RNA
ctgggcccaggggctgaggc

SEQ ID NO: 2924 - RNA, 20 nt, synthetic construct
  source 1..20: mol_type = other RNA
gatcgagtggccccaggtcc

SEQ ID NO: 2925 - RNA, 20 nt, synthetic construct
  source 1..20: mol_type = other RNA
tcacccgacttctgaacgtg

SEQ ID NO: 2926 - RNA, 20 nt, synthetic construct
  source 1..20: mol_type = other RNA
ttacctgcccactgttagcc

SEQ ID NO: 2927 - RNA, 20 nt, synthetic construct
  source 1..20: mol_type = other RNA
gaagccacaggaagtctgtg

SEQ ID NO: 2928 - RNA, 20 nt, synthetic construct
  source 1..20: mol_type = other RNA
actccagttcctgacggctg

SEQ ID NO: 2929 - RNA, 20 nt, synthetic construct
  source 1..20: mol_type = other RNA
acctacaggagtacctgacg

SEQ ID NO: 2930 - RNA, 20 nt, synthetic construct
  source 1..20: mol_type = other RNA
ttcccagagcaccagagcca

SEQ ID NO: 2931 - RNA, 20 nt, synthetic construct
  source 1..20: mol_type = other RNA
acgttcagaagtcgggtgag

SEQ ID NO: 2932 - RNA, 20 nt, synthetic construct
  source 1..20: mol_type = other RNA
ttcagagcagtttgagacag

SEQ ID NO: 2933 - RNA, 20 nt, synthetic construct
  source 1..20: mol_type = other RNA
cctgctgggaaacagacaac

SEQ ID NO: 2934 - RNA, 20 nt, synthetic construct
  source 1..20: mol_type = other RNA
cactcacagtctagggtggc

SEQ ID NO: 2935 - RNA, 20 nt, synthetic construct
  source 1..20: mol_type = other RNA
caaccggcagcgagggaacg

SEQ ID NO: 2936 - RNA, 20 nt, synthetic construct
  source 1..20: mol_type = other RNA
acagggctggggcaggacag

SEQ ID NO: 2937 - RNA, 20 nt, synthetic construct
  source 1..20: mol_type = other RNA
catccaccagctcgcagcac

SEQ ID NO: 2938 - RNA, 20 nt, synthetic construct
  source 1..20: mol_type = other RNA
atccaccagctcgcagcaca

SEQ ID NO: 2939 - RNA, 20 nt, synthetic construct
  source 1..20: mol_type = other RNA
tccaccagctcgcagcacag

SEQ ID NO: 2940 - RNA, 20 nt, synthetic construct
  source 1..20: mol_type = other RNA
ccaccagctcgcagcacagg

SEQ ID NO: 2941 - RNA, 20 nt, synthetic construct
  source 1..20: mol_type = other RNA
tgtcacctggcaggaggagg

SEQ ID NO: 2942 - RNA, 20 nt, synthetic construct
  source 1..20: mol_type = other RNA
gtcacctggcaggaggaggc

SEQ ID NO: 2943 - RNA, 20 nt, synthetic construct
  source 1..20: mol_type = other RNA
ggcaccctgcagggagaaga

SEQ ID NO: 2944 - RNA, 20 nt, synthetic construct
  source 1..20: mol_type = other RNA
gcaccctgcagggagaagaa

SEQ ID NO: 2945 - RNA, 20 nt, synthetic construct
  source 1..20: mol_type = other RNA
attctgtcgtgggtaggggc

SEQ ID NO: 2946 - RNA, 20 nt, synthetic construct
  source 1..20: mol_type = other RNA
ctccattctgtcgtgggtag

SEQ ID NO: 2947 - RNA, 20 nt, synthetic construct
  source 1..20: mol_type = other RNA
cctcgggctgcaaaggagag

SEQ ID NO: 2948 - RNA, 20 nt, synthetic construct
  source 1..20: mol_type = other RNA
cgggctgcaaaggagagggg

SEQ ID NO: 2949 - RNA, 20 nt, synthetic construct
  source 1..20: mol_type = other RNA
gctgacctttccggtatccc

SEQ ID NO: 2950 - RNA, 20 nt, synthetic construct
  source 1..20: mol_type = other RNA
ctgacctttccggtatccca

SEQ ID NO: 2951 - RNA, 20 nt, synthetic construct
  source 1..20: mol_type = other RNA
tgttgcactgagatggggca

SEQ ID NO: 2952 - RNA, 20 nt, synthetic construct
  source 1..20: mol_type = other RNA
ctgttgcactgagatggggc

SEQ ID NO: 2953 - RNA, 20 nt, synthetic construct
  source 1..20: mol_type = other RNA
gccctgcagcccccagaacc

SEQ ID NO: 2954 - RNA, 20 nt, synthetic construct
  source 1..20: mol_type = other RNA
ctcacccgcagtgacacaca

SEQ ID NO: 2955 - RNA, 20 nt, synthetic construct
  source 1..20: mol_type = other RNA
gcagcacccagggcaggacc

SEQ ID NO: 2956 - RNA, 20 nt, synthetic construct
  source 1..20: mol_type = other RNA
cagcacccagggcaggacca

SEQ ID NO: 2957 - RNA, 20 nt, synthetic construct
  source 1..20: mol_type = other RNA
gtccctgtggaacagcagca

SEQ ID NO: 2958 - RNA, 20 nt, synthetic construct
  source 1..20: mol_type = other RNA
gtgggttcaagttcggatgg

SEQ ID NO: 2959 - RNA, 20 nt, synthetic construct
  source 1..20: mol_type = other RNA
gccccacctgggtctgagct

SEQ ID NO: 2960 - RNA, 20 nt, synthetic construct
  source 1..20: mol_type = other RNA
ggccccacctgggtctgagc

SEQ ID NO: 2961 - RNA, 20 nt, synthetic construct
  source 1..20: mol_type = other RNA
ccacctgggtctgagctggg

SEQ ID NO: 2962 - RNA, 20 nt, synthetic construct
  source 1..20: mol_type = other RNA
aggcctcccaggagccctca

SEQ ID NO: 2963 - RNA, 20 nt, synthetic construct
  source 1..20: mol_type = other RNA
ctcccaggagccctcaggga

SEQ ID NO: 2964 - RNA, 20 nt, synthetic construct
  source 1..20: mol_type = other RNA
cccccagctcacagtcacca

SEQ ID NO: 2965 - RNA, 20 nt, synthetic construct
  source 1..20: mol_type = other RNA
ggtctcaccggtgcttatgt

SEQ ID NO: 2966 - RNA, 20 nt, synthetic construct
  source 1..20: mol_type = other RNA
tgctgcgccgacataagcac

SEQ ID NO: 2967 - RNA, 20 nt, synthetic construct
  source 1..20: mol_type = other RNA
ggcagggctgggagagagca

SEQ ID NO: 2968 - RNA, 20 nt, synthetic construct
  source 1..20: mol_type = other RNA
cgagagcacgagcatgggtg

SEQ ID NO: 2969 - RNA, 20 nt, synthetic construct
  source 1..20: mol_type = other RNA
gagcacgagcatgggtgagg

SEQ ID NO: 2970 - RNA, 20 nt, synthetic construct
  source 1..20: mol_type = other RNA
agcacgagcatgggtgagga

SEQ ID NO: 2971 - RNA, 20 nt, synthetic construct
  source 1..20: mol_type = other RNA
gcacgagcatgggtgaggag

SEQ ID NO: 2972 - RNA, 20 nt, synthetic construct
  source 1..20: mol_type = other RNA
ctcacccatgctcgtgctct

SEQ ID NO: 2973 - RNA, 20 nt, synthetic construct
  source 1..20: mol_type = other RNA
ggtgcctgcgcgggggaagg

SEQ ID NO: 2974 - RNA, 20 nt, synthetic construct
  source 1..20: mol_type = other RNA
gtgcctgcgcgggggaagga

SEQ ID NO: 2975 - RNA, 20 nt, synthetic construct
  source 1..20: mol_type = other RNA
cttggtgcctgcgcggggga

SEQ ID NO: 2976 - RNA, 20 nt, synthetic construct
  source 1..20: mol_type = other RNA
ggccccagggccctgccgcc

SEQ ID NO: 2977 - RNA, 20 nt, synthetic construct
  source 1..20: mol_type = other RNA
tctacgctcaggcaggggag

SEQ ID NO: 2978 - RNA, 20 nt, synthetic construct
  source 1..20: mol_type = other RNA
ccaccaggacggccccccat

SEQ ID NO: 2979 - RNA, 20 nt, synthetic construct
  source 1..20: mol_type = other RNA
aggcccaggcggcagggccc

SEQ ID NO: 2980 - RNA, 20 nt, synthetic construct
  source 1..20: mol_type = other RNA
ggcccaggcggcagggccct

SEQ ID NO: 2981 - RNA, 20 nt, synthetic construct
  source 1..20: mol_type = other RNA
acgactggccagggcgcctg

SEQ ID NO: 2982 - RNA, 20 nt, synthetic construct
  source 1..20: mol_type = other RNA
caccgcccagacgactggcc

SEQ ID NO: 2983 - RNA, 20 nt, synthetic construct
  source 1..20: mol_type = other RNA
ctacaactgggctggcggcc

SEQ ID NO: 2984 - RNA, 20 nt, synthetic construct
  source 1..20: mol_type = other RNA
cagcaaccagacggacaagc

SEQ ID NO: 2985 - RNA, 20 nt, synthetic construct
  source 1..20: mol_type = other RNA
gtgtcacacaactgcccaac

SEQ ID NO: 2986 - RNA, 20 nt, synthetic construct
  source 1..20: mol_type = other RNA
agccggccagttccaaaccc

SEQ ID NO: 2987 - RNA, 20 nt, synthetic construct
  source 1..20: mol_type = other RNA
cggccagttccaaaccctgg

SEQ ID NO: 2988 - RNA, 20 nt, synthetic construct
  source 1..20: mol_type = other RNA
tccctgcagagaaacacact

SEQ ID NO: 2989 - RNA, 20 nt, synthetic construct
  source 1..20: mol_type = other RNA
gagactcaccaggggctggc

SEQ ID NO: 2990 - RNA, 20 nt, synthetic construct
  source 1..20: mol_type = other RNA
cctccttctttgaggagaaa

SEQ ID NO: 2991 - RNA, 20 nt, synthetic construct
  source 1..20: mol_type = other RNA
ccagtggcgagagaagaccc

SEQ ID NO: 2992 - RNA, 20 nt, synthetic construct
  source 1..20: mol_type = other RNA
tgcccagccactgaggcctg

SEQ ID NO: 2993 - RNA, 20 nt, synthetic construct
  source 1..20: mol_type = other RNA
cgactggccagggcgcctgt

SEQ ID NO: 2994 - RNA, 20 nt, synthetic construct
  source 1..20: mol_type = other RNA
accgcccagacgactggcca

SEQ ID NO: 2995 - RNA, 20 nt, synthetic construct
  source 1..20: mol_type = other RNA
tatccaaggactgagggcca

SEQ ID NO: 2996 - RNA, 20 nt, synthetic construct
  source 1..20: mol_type = other RNA
ggcgtctcaaacaggtatct

SEQ ID NO: 2997 - RNA, 20 nt, synthetic construct
  source 1..20: mol_type = other RNA
caaagcctgaagagaaatcc

SEQ ID NO: 2998 - RNA, 20 nt, synthetic construct
  source 1..20: mol_type = other RNA
agagcctgaaggagaagtct

SEQ ID NO: 2999 - RNA, 20 nt, synthetic construct
  source 1..20: mol_type = other RNA
tcccagtaccgggaaggcga

SEQ ID NO: 3000 - RNA, 20 nt, synthetic construct
  source 1..20: mol_type = other RNA
ggttcctgtggagcacaggg

SEQ ID NO: 3001 - RNA, 20 nt, synthetic construct
  source 1..20: mol_type = other RNA
tggggttcctgtggagcaca

SEQ ID NO: 3002 - RNA, 20 nt, synthetic construct
  source 1..20: mol_type = other RNA
tcatttcctagatgggagac

SEQ ID NO: 3003 - RNA, 20 nt, synthetic construct
  source 1..20: mol_type = other RNA
ttcctagatgggagacaggc

SEQ ID NO: 3004 - RNA, 20 nt, synthetic construct
  source 1..20: mol_type = other RNA
ccaggtgtctgaggaggaag

SEQ ID NO: 3005 - RNA, 20 nt, synthetic construct
  source 1..20: mol_type = other RNA
gtgtctgaggaggaagggga

SEQ ID NO: 3006 - RNA, 20 nt, synthetic construct
  source 1..20: mol_type = other RNA
tagtcctgggtggggtaggg

SEQ ID NO: 3007 - RNA, 20 nt, synthetic construct
  source 1..20: mol_type = other RNA
agtcctgggtggggtagggt

SEQ ID NO: 3008 - RNA, 20 nt, synthetic construct
  source 1..20: mol_type = other RNA
cattacctcatagtaggcaa

SEQ ID NO: 3009 - RNA, 20 nt, synthetic construct
  source 1..20: mol_type = other RNA
ccattacctcatagtaggca

SEQ ID NO: 3010 - RNA, 20 nt, synthetic construct
  source 1..20: mol_type = other RNA
acagatctgagcagataaca

SEQ ID NO: 3011 - RNA, 20 nt, synthetic construct
  source 1..20: mol_type = other RNA
tcctacccactggttgccct

SEQ ID NO: 3012 - RNA, 20 nt, synthetic construct
  source 1..20: mol_type = other RNA
aggtgcagtacctgaaggac

SEQ ID NO: 3013 - RNA, 20 nt, synthetic construct
  source 1..20: mol_type = other RNA
caggcagctggcgggcgcca

SEQ ID NO: 3014 - RNA, 20 nt, synthetic construct
  source 1..20: mol_type = other RNA
gacttccagggctccttctg

SEQ ID NO: 3015 - RNA, 20 nt, synthetic construct
  source 1..20: mol_type = other RNA
catccagatacattttgtca

SEQ ID NO: 3016 - RNA, 20 nt, synthetic construct
  source 1..20: mol_type = other RNA
acctgccaaacacagacagt

SEQ ID NO: 3017 - RNA, 20 nt, synthetic construct
  source 1..20: mol_type = other RNA
cgtgcagatgcaatggtcca

SEQ ID NO: 3018 - RNA, 20 nt, synthetic construct
  source 1..20: mol_type = other RNA
tgtaactgtaacaaaacata

SEQ ID NO: 3019 - RNA, 20 nt, synthetic construct
  source 1..20: mol_type = other RNA
acttaccaccgaccatgcat

SEQ ID NO: 3020 - RNA, 20 nt, synthetic construct
  source 1..20: mol_type = other RNA
cttaccaaaaaccttgactg

SEQ ID NO: 3021 - RNA, 20 nt, synthetic construct
  source 1..20: mol_type = other RNA
ccagtccaaatcttcgatga

SEQ ID NO: 3022 - RNA, 20 nt, synthetic construct
  source 1..20: mol_type = other RNA
cagtccaaatcttcgatgat

SEQ ID NO: 3023 - RNA, 20 nt, synthetic construct
  source 1..20: mol_type = other RNA
aaaccatgtgatatttgctt

SEQ ID NO: 3024 - RNA, 20 nt, synthetic construct
  source 1..20: mol_type = other RNA
atgttccacactttatttcc

SEQ ID NO: 3025 - RNA, 20 nt, synthetic construct
  source 1..20: mol_type = other RNA
tcacgttgaggagtggtgtt

SEQ ID NO: 3026 - RNA, 20 nt, synthetic construct
  source 1..20: mol_type = other RNA
cattgtctagggatataaag

SEQ ID NO: 3027 - RNA, 20 nt, synthetic construct
  source 1..20: mol_type = other RNA
acattgtctagggatataaa

SEQ ID NO: 3028 - RNA, 20 nt, synthetic construct
  source 1..20: mol_type = other RNA
gacattgtctagggatataa

SEQ ID NO: 3029 - RNA, 20 nt, synthetic construct
  source 1..20: mol_type = other RNA
tggccaggacattccatctt

SEQ ID NO: 3030 - RNA, 20 nt, synthetic construct
  source 1..20: mol_type = other RNA
ccattctaggaacaaaatat

SEQ ID NO: 3031 - RNA, 20 nt, synthetic construct
  source 1..20: mol_type = other RNA
gagcttccaagtcttctcca

SEQ ID NO: 3032 - RNA, 20 nt, synthetic construct
  source 1..20: mol_type = other RNA
tccccgaaaaggtcgaattt

SEQ ID NO: 3033 - RNA, 20 nt, synthetic construct
  source 1..20: mol_type = other RNA
atgaagaacagtcacaggac

SEQ ID NO: 3034 - RNA, 20 nt, synthetic construct
  source 1..20: mol_type = other RNA
gatttcgtctgtaggcacaa

SEQ ID NO: 3035 - RNA, 20 nt, synthetic construct
  source 1..20: mol_type = other RNA
taaacttacctgaaacagcc

SEQ ID NO: 3036 - RNA, 20 nt, synthetic construct
  source 1..20: mol_type = other RNA
attcagacagtgccttcatg

SEQ ID NO: 3037 - RNA, 20 nt, synthetic construct
  source 1..20: mol_type = other RNA
gttgcactcgattgggacag

SEQ ID NO: 3038 - RNA, 20 nt, synthetic construct
  source 1..20: mol_type = other RNA
ttatttcaagccctgattga

SEQ ID NO: 3039 - RNA, 20 nt, synthetic construct
  source 1..20: mol_type = other RNA
ttacctgtgtaacttttata

SEQ ID NO: 3040 - RNA, 20 nt, synthetic construct
  source 1..20: mol_type = other RNA
attgttcctggaatttgggg

SEQ ID NO: 3041 - RNA, 20 nt, synthetic construct
  source 1..20: mol_type = other RNA
gttcctggaatttggggagg

SEQ ID NO: 3042 - RNA, 20 nt, synthetic construct
  source 1..20: mol_type = other RNA
ctgccatgccgtaaggcaag

SEQ ID NO: 3043 - RNA, 20 nt, synthetic construct
  source 1..20: mol_type = other RNA
tctacctttggtgaacccgt

SEQ ID NO: 3044 - RNA, 20 nt, synthetic construct
  source 1..20: mol_type = other RNA
cttaccttagctccttctaa

SEQ ID NO: 3045 - RNA, 20 nt, synthetic construct
  source 1..20: mol_type = other RNA
gggatgtcgactcctagggg

SEQ ID NO: 3046 - RNA, 20 nt, synthetic construct
  source 1..20: mol_type = other RNA
cgagggcaccatgcttcaag

SEQ ID NO: 3047 - RNA, 20 nt, synthetic construct
  source 1..20: mol_type = other RNA
aaactcactttatgctaggg

SEQ ID NO: 3048 - RNA, 20 nt, synthetic construct
  source 1..20: mol_type = other RNA
ctcactttatgctagggagg

SEQ ID NO: 3049 - RNA, 20 nt, synthetic construct
  source 1..20: mol_type = other RNA
cttcacctgcatttaaagaa

SEQ ID NO: 3050 - RNA, 20 nt, synthetic construct
  source 1..20: mol_type = other RNA
ccaccagattagctctggcc

SEQ ID NO: 3051 - RNA, 20 nt, synthetic construct
  source 1..20: mol_type = other RNA
ctacctttggtgaacccgtt

SEQ ID NO: 3052 - RNA, 20 nt, synthetic construct
  source 1..20: mol_type = other RNA
atgttccagatgtccagata

SEQ ID NO: 3053 - RNA, 20 nt, synthetic construct
  source 1..20: mol_type = other RNA
tgttccagatgtccagatat

SEQ ID NO: 3054 - RNA, 20 nt, synthetic construct
  source 1..20: mol_type = other RNA
agatagacaaacaagttgga

SEQ ID NO: 3055 - RNA, 20 nt, synthetic construct
  source 1..20: mol_type = other RNA
agcttgcaccaagtcacatg

SEQ ID NO: 3056 - RNA, 20 nt, synthetic construct
  source 1..20: mol_type = other RNA
acccaccttggtgccttctc

SEQ ID NO: 3057 - RNA, 20 nt, synthetic construct
  source 1..20: mol_type = other RNA
tggagtacctgaggaatatc

SEQ ID NO: 3058 - RNA, 20 nt, synthetic construct
  source 1..20: mol_type = other RNA
ttaccccacttaactatctt

SEQ ID NO: 3059 - RNA, 18 nt, synthetic construct
  source 1..18: mol_type = other RNA
taccccacttaactatct

SEQ ID NO: 3060 - RNA, 20 nt, synthetic construct
  source 1..20: mol_type = other RNA
ctcaggtactccaaagattc

SEQ ID NO: 3061 - RNA, 20 nt, synthetic construct
  source 1..20: mol_type = other RNA
catttgccagacagaacctc

SEQ ID NO: 3062 - RNA, 20 nt, synthetic construct
  source 1..20: mol_type = other RNA
aaacaagaccaaaaggctaa

SEQ ID NO: 3063 - RNA, 20 nt, synthetic construct
  source 1..20: mol_type = other RNA
gtaagccaagaaagaaatcc

SEQ ID NO: 3064 - RNA, 20 nt, synthetic construct
  source 1..20: mol_type = other RNA
gcttcagattctgaatgagc

SEQ ID NO: 3065 - RNA, 20 nt, synthetic construct
  source 1..20: mol_type = other RNA
ttaaaacaaaatgaaatgaa

SEQ ID NO: 3066 - RNA, 20 nt, synthetic construct
  source 1..20: mol_type = other RNA
gttcctcagcttccttcaga

SEQ ID NO: 3067 - RNA, 20 nt, synthetic construct
  source 1..20: mol_type = other RNA
caaagagcaagagattctga

SEQ ID NO: 3068 - RNA, 20 nt, synthetic construct
  source 1..20: mol_type = other RNA
aaagagcaagagattctgaa

SEQ ID NO: 3069 - RNA, 20 nt, synthetic construct
  source 1..20: mol_type = other RNA
acacagcactatctgaaacc

SEQ ID NO: 3070 - RNA, 20 nt, synthetic construct
  source 1..20: mol_type = other RNA
cacccagaaaacaacacagc

SEQ ID NO: 3071 - RNA, 20 nt, synthetic construct
  source 1..20: mol_type = other RNA
taccaagttgaaatgaatca

SEQ ID NO: 3072 - RNA, 20 nt, synthetic construct
  source 1..20: mol_type = other RNA
atgaatcaagggcagtccca

SEQ ID NO: 3073 - RNA, 20 nt, synthetic construct
  source 1..20: mol_type = other RNA
agggcagtcccaaggtacag

SEQ ID NO: 3074 - RNA, 20 nt, synthetic construct
  source 1..20: mol_type = other RNA
gttccaaaaaccctcacacc

SEQ ID NO: 3075 - RNA, 20 nt, synthetic construct
  source 1..20: mol_type = other RNA
gaaacagcacttgaatcaac

SEQ ID NO: 3076 - RNA, 20 nt, synthetic construct
  source 1..20: mol_type = other RNA
attacaaataaagaataaag

SEQ ID NO: 3077 - RNA, 20 nt, synthetic construct
  source 1..20: mol_type = other RNA
taatgtccaaatgggactgg

SEQ ID NO: 3078 - RNA, 20 nt, synthetic construct
  source 1..20: mol_type = other RNA
caaagcaagatcttcttcac

SEQ ID NO: 3079 - RNA, 20 nt, synthetic construct
  source 1..20: mol_type = other RNA
acaacaagcttcagttctac

SEQ ID NO: 3080 - RNA, 20 nt, synthetic construct
  source 1..20: mol_type = other RNA
ctgcgcaacttgctcagcaa

SEQ ID NO: 3081 - RNA, 20 nt, synthetic construct
  source 1..20: mol_type = other RNA
cactcagacccctccccaga

SEQ ID NO: 3082 - RNA, 20 nt, synthetic construct
  source 1..20: mol_type = other RNA
tttttccatgttttgttttc

SEQ ID NO: 3083 - RNA, 20 nt, synthetic construct
  source 1..20: mol_type = other RNA
ttacctacacatctgcaaga

SEQ ID NO: 3084 - RNA, 20 nt, synthetic construct
  source 1..20: mol_type = other RNA
acacttacccacttagcaat

SEQ ID NO: 3085 - RNA, 20 nt, synthetic construct
  source 1..20: mol_type = other RNA
catgcagaatggcagcacat

SEQ ID NO: 3086 - RNA, 20 nt, synthetic construct
  source 1..20: mol_type = other RNA
aagctcaggaggagaaaaaa

SEQ ID NO: 3087 - RNA, 20 nt, synthetic construct
  source 1..20: mol_type = other RNA
cgcaagccaggctaaacagt

SEQ ID NO: 3088 - RNA, 20 nt, synthetic construct
  source 1..20: mol_type = other RNA
ttctccccagtctcagccga

SEQ ID NO: 3089 - RNA, 20 nt, synthetic construct
  source 1..20: mol_type = other RNA
tggtcaggaaaagcagccat

SEQ ID NO: 3090 - RNA, 20 nt, synthetic construct
  source 1..20: mol_type = other RNA
ctagtccagggtgtggcttc

SEQ ID NO: 3091 - RNA, 20 nt, synthetic construct
  source 1..20: mol_type = other RNA
ccccaaaatcaacatggcag

SEQ ID NO: 3092 - RNA, 20 nt, synthetic construct
  source 1..20: mol_type = other RNA
tgtgatccagcagccttctt

SEQ ID NO: 3093 - RNA, 20 nt, synthetic construct
  source 1..20: mol_type = other RNA
gaccagatcaaggccataag

SEQ ID NO: 3094 - RNA, 20 nt, synthetic construct
  source 1..20: mol_type = other RNA
caagacaagaaaagcatgaa

SEQ ID NO: 3095 - RNA, 20 nt, synthetic construct
  source 1..20: mol_type = other RNA
ctgaacagggactgttagga

SEQ ID NO: 3096 - RNA, 20 nt, synthetic construct
  source 1..20: mol_type = other RNA
ccagagctcagagtggcaac

SEQ ID NO: 3097 - RNA, 20 nt, synthetic construct
  source 1..20: mol_type = other RNA
ttgctgcagacgccccgtga

SEQ ID NO: 3098 - RNA, 20 nt, synthetic construct
  source 1..20: mol_type = other RNA
ctgcagacgccccgtgacgg

SEQ ID NO: 3099 - RNA, 20 nt, synthetic construct
  source 1..20: mol_type = other RNA
cgacaagcagtgcctttgct

SEQ ID NO: 3100 - RNA, 20 nt, synthetic construct
  source 1..20: mol_type = other RNA
gcccagaacgtgattgacta

SEQ ID NO: 3101 - RNA, 20 nt, synthetic construct
  source 1..20: mol_type = other RNA
tgtgccaggggtgttatgac

SEQ ID NO: 3102 - RNA, 20 nt, synthetic construct
  source 1..20: mol_type = other RNA
cagatccagtctgatggcag

SEQ ID NO: 3103 - RNA, 20 nt, synthetic construct
  source 1..20: mol_type = other RNA
tgtacacgatggtcagccat

SEQ ID NO: 3104 - RNA, 20 nt, synthetic construct
  source 1..20: mol_type = other RNA
ttttaccttggggctctgac

SEQ ID NO: 3105 - RNA, 20 nt, synthetic construct
  source 1..20: mol_type = other RNA
agccccaaggtaaaaaggcc

SEQ ID NO: 3106 - RNA, 20 nt, synthetic construct
  source 1..20: mol_type = other RNA
gagccccaaggtaaaaaggc

SEQ ID NO: 3107 - RNA, 20 nt, synthetic construct
  source 1..20: mol_type = other RNA
cagctcacagtgtgccacca

SEQ ID NO: 3108 - RNA, 20 nt, synthetic construct
  source 1..20: mol_type = other RNA
tatgaccagatggacctggc

SEQ ID NO: 3109 - RNA, 20 nt, synthetic construct
  source 1..20: mol_type = other RNA
actggaccagtatgtcttcc

SEQ ID NO: 3110 - RNA, 20 nt, synthetic construct
  source 1..20: mol_type = other RNA
tgtcttccaggactcccagc

SEQ ID NO: 3111 - RNA, 20 nt, synthetic construct
  source 1..20: mol_type = other RNA
ttcaaccaggagccagcctc

SEQ ID NO: 3112 - RNA, 20 nt, synthetic construct
  source 1..20: mol_type = other RNA
gaccagattcccagtatgtt

SEQ ID NO: 3113 - RNA, 20 nt, synthetic construct
  source 1..20: mol_type = other RNA
taacatactgggaatctggt

SEQ ID NO: 3114 - RNA, 20 nt, synthetic construct
  source 1..20: mol_type = other RNA
aaaggcactgcaagagacaa

SEQ ID NO: 3115 - RNA, 20 nt, synthetic construct
  source 1..20: mol_type = other RNA
ctctggcaaatctctgaggc

SEQ ID NO: 3116 - RNA, 20 nt, synthetic construct
  source 1..20: mol_type = other RNA
agccaagtaccccctcccag

SEQ ID NO: 3117 - RNA, 20 nt, synthetic construct
  source 1..20: mol_type = other RNA
acctcccgagcaaacatgac

SEQ ID NO: 3118 - RNA, 20 nt, synthetic construct
  source 1..20: mol_type = other RNA
ccttacctgtcatgtttgct

SEQ ID NO: 3119 - RNA, 20 nt, synthetic construct
  source 1..20: mol_type = other RNA
tgctctggagatggagaagc

SEQ ID NO: 3120 - RNA, 20 nt, synthetic construct
  source 1..20: mol_type = other RNA
cccacccaatgcccggcagc

SEQ ID NO: 3121 - RNA, 20 nt, synthetic construct
  source 1..20: mol_type = other RNA
aggccattttggaagcttgt

SEQ ID NO: 3122 - RNA, 20 nt, synthetic construct
  source 1..20: mol_type = other RNA
accggctctgcaaaggccag

SEQ ID NO: 3123 - RNA, 20 nt, synthetic construct
  source 1..20: mol_type = other RNA
tggtgcaggccaggctggag

SEQ ID NO: 3124 - RNA, 20 nt, synthetic construct
  source 1..20: mol_type = other RNA
gaacggcagctggcccaagg

SEQ ID NO: 3125 - RNA, 20 nt, synthetic construct
  source 1..20: mol_type = other RNA
ggcccaaggaggcctggctg

SEQ ID NO: 3126 - RNA, 20 nt, synthetic construct
  source 1..20: mol_type = other RNA
gacacgagtgattgctgtgc

SEQ ID NO: 3127 - RNA, 20 nt, synthetic construct
  source 1..20: mol_type = other RNA
ctggtcagggcaagagctat

SEQ ID NO: 3128 - RNA, 20 nt, synthetic construct
  source 1..20: mol_type = other RNA
gggcccacagccactcgtgg

SEQ ID NO: 3129 - RNA, 20 nt, synthetic construct
  source 1..20: mol_type = other RNA
ttccagaagaagctgctccg

SEQ ID NO: 3130 - RNA, 20 nt, synthetic construct
  source 1..20: mol_type = other RNA
cctggtccagagcctgagca

SEQ ID NO: 3131 - RNA, 20 nt, synthetic construct
  source 1..20: mol_type = other RNA
cagacatcaaagtaccctac

SEQ ID NO: 3132 - RNA, 20 nt, synthetic construct
  source 1..20: mol_type = other RNA
acatcaaagtaccctacagg

SEQ ID NO: 3133 - RNA, 20 nt, synthetic construct
  source 1..20: mol_type = other RNA
cgcccaggtcctcacgtctg

SEQ ID NO: 3134 - RNA, 20 nt, synthetic construct
  source 1..20: mol_type = other RNA
cttagtccaacacccaccgc

SEQ ID NO: 3135 - RNA, 20 nt, synthetic construct
  source 1..20: mol_type = other RNA
cctcctgcaatgcttcctgg

SEQ ID NO: 3136 - RNA, 20 nt, synthetic construct
  source 1..20: mol_type = other RNA
gagccagccacagggccccc

SEQ ID NO: 3137 - RNA, 20 nt, synthetic construct
  source 1..20: mol_type = other RNA
ggaagcagaaggtgcttgcg

SEQ ID NO: 3138 - RNA, 20 nt, synthetic construct
  source 1..20: mol_type = other RNA
ggctgcagccggggacactg

SEQ ID NO: 3139 - RNA, 20 nt, synthetic construct
  source 1..20: mol_type = other RNA
ctgccaaattccagcctcct

SEQ ID NO: 3140 - RNA, 20 nt, synthetic construct
  source 1..20: mol_type = other RNA
ggcgggccaagacttctccc

SEQ ID NO: 3141 - RNA, 20 nt, synthetic construct
  source 1..20: mol_type = other RNA
agactcagaggtgagaggag

SEQ ID NO: 3142 - RNA, 20 nt, synthetic construct
  source 1..20: mol_type = other RNA
agcctaggaggcaaagagca

SEQ ID NO: 3143 - RNA, 20 nt, synthetic construct
  source 1..20: mol_type = other RNA
cccccaggctttccccaaac

SEQ ID NO: 3144 - RNA, 20 nt, synthetic construct
  source 1..20: mol_type = other RNA
tcactccagatgctgcaggg

SEQ ID NO: 3145 - RNA, 20 nt, synthetic construct
  source 1..20: mol_type = other RNA
aggctgcaggtggaatcaga

SEQ ID NO: 3146 - RNA, 20 nt, synthetic construct
  source 1..20: mol_type = other RNA
cttcccccagctgaagtcct

SEQ ID NO: 3147 - RNA, 20 nt, synthetic construct
  source 1..20: mol_type = other RNA
cactcacttgagggtttcca

SEQ ID NO: 3148 - RNA, 20 nt, synthetic construct
  source 1..20: mol_type = other RNA
cagactgcggggacacagtg

SEQ ID NO: 3149 - RNA, 20 nt, synthetic construct
  source 1..20: mol_type = other RNA
ccactcaccttagcctgagc

SEQ ID NO: 3150 - RNA, 20 nt, synthetic construct
  source 1..20: mol_type = other RNA
gtacaagctgtcggaaacag

SEQ ID NO: 3151 - RNA, 20 nt, synthetic construct
  source 1..20: mol_type = other RNA
acactcactccatcacccgg

SEQ ID NO: 3152 - RNA, 20 nt, synthetic construct
  source 1..20: mol_type = other RNA
cactcactccatcacccgga

SEQ ID NO: 3153 - RNA, 20 nt, synthetic construct
  source 1..20: mol_type = other RNA
cgtccagtacaacaagttca

SEQ ID NO: 3154 - RNA, 20 nt, synthetic construct
  source 1..20: mol_type = other RNA
ccacatcctgcaagggggga

SEQ ID NO: 3155 - RNA, 20 nt, synthetic construct
  source 1..20: mol_type = other RNA
cacatcctgcaaggggggat

SEQ ID NO: 3156 - RNA, 20 nt, synthetic construct
  source 1..20: mol_type = other RNA
tgggcgtccacatcctgcaa

SEQ ID NO: 3157 - RNA, 20 nt, synthetic construct
  source 1..20: mol_type = other RNA
gggcgtccacatcctgcaag

SEQ ID NO: 3158 - RNA, 20 nt, synthetic construct
  source 1..20: mol_type = other RNA
ggcgtccacatcctgcaagg

SEQ ID NO: 3159 - RNA, 20 nt, synthetic construct
  source 1..20: mol_type = other RNA
gcgtccacatcctgcaaggg

SEQ ID NO: 3160 - RNA, 20 nt, synthetic construct
  source 1..20: mol_type = other RNA
gcccaaggtaagagcttccc

SEQ ID NO: 3161 - RNA, 20 nt, synthetic construct
  source 1..20: mol_type = other RNA
gctcttaccttgggcagcca

SEQ ID NO: 3162 - RNA, 20 nt, synthetic construct
  source 1..20: mol_type = other RNA
agctcttaccttgggcagcc

SEQ ID NO: 3163 - RNA, 20 nt, synthetic construct
  source 1..20: mol_type = other RNA
tgcacctctggggaggacct

SEQ ID NO: 3164 - RNA, 20 nt, synthetic construct
  source 1..20: mol_type = other RNA
ctgcacctctggggaggacc

SEQ ID NO: 3165 - RNA, 20 nt, synthetic construct
  source 1..20: mol_type = other RNA
cgcctgcagctgtcggacac

SEQ ID NO: 3166 - RNA, 20 nt, synthetic construct
  source 1..20: mol_type = other RNA
cacctgccaggccatcacgg

SEQ ID NO: 3167 - RNA, 20 nt, synthetic construct
  source 1..20: mol_type = other RNA
cctctgagaaggaaaaaaga

SEQ ID NO: 3168 - RNA, 20 nt, synthetic construct
  source 1..20: mol_type = other RNA
cagaggaacagtcccaagga

SEQ ID NO: 3169 - RNA, 20 nt, synthetic construct
  source 1..20: mol_type = other RNA
cactcacctgcccacagcag

SEQ ID NO: 3170 - RNA, 20 nt, synthetic construct
  source 1..20: mol_type = other RNA
ccactcacctgcccacagca

SEQ ID NO: 3171 - RNA, 20 nt, synthetic construct
  source 1..20: mol_type = other RNA
gccactcacctgcccacagc

SEQ ID NO: 3172 - RNA, 20 nt, synthetic construct
  source 1..20: mol_type = other RNA
agggcccctgtggggaaacg

SEQ ID NO: 3173 - RNA, 20 nt, synthetic construct
  source 1..20: mol_type = other RNA
gggcccctgtggggaaacga

SEQ ID NO: 3174 - RNA, 20 nt, synthetic construct
  source 1..20: mol_type = other RNA
gcaagtgcaggagtcagtga

SEQ ID NO: 3175 - RNA, 20 nt, synthetic construct
  source 1..20: mol_type = other RNA
cggaaccagtaaccatgaac

SEQ ID NO: 3176 - RNA, 20 nt, synthetic construct
  source 1..20: mol_type = other RNA
ggaaccagtaaccatgaact

SEQ ID NO: 3177 - RNA, 20 nt, synthetic construct
  source 1..20: mol_type = other RNA
gaaccagtaaccatgaactg

SEQ ID NO: 3178 - RNA, 20 nt, synthetic construct
  source 1..20: mol_type = other RNA
gctagatcaagaagtacagg

SEQ ID NO: 3179 - RNA, 20 nt, synthetic construct
  source 1..20: mol_type = other RNA
agaagtacaggaggagactc

SEQ ID NO: 3180 - RNA, 20 nt, synthetic construct
  source 1..20: mol_type = other RNA
caagtctagtgaggagaaag

SEQ ID NO: 3181 - RNA, 20 nt, synthetic construct
  source 1..20: mol_type = other RNA
aagtctagtgaggagaaaga

SEQ ID NO: 3182 - RNA, 20 nt, synthetic construct
  source 1..20: mol_type = other RNA
agtctagtgaggagaaagag

SEQ ID NO: 3183 - RNA, 20 nt, synthetic construct
  source 1..20: mol_type = other RNA
acaggcccaggacacagagc

SEQ ID NO: 3184 - RNA, 20 nt, synthetic construct
  source 1..20: mol_type = other RNA
acctgtcaggtgaagttcgc

SEQ ID NO: 3185 - RNA, 20 nt, synthetic construct
  source 1..20: mol_type = other RNA
acttacaggtgacgttgagc

SEQ ID NO: 3186 - RNA, 20 nt, synthetic construct
  source 1..20: mol_type = other RNA
aacatctaggagaggaagag

SEQ ID NO: 3187 - RNA, 20 nt, synthetic construct
  source 1..20: mol_type = other RNA
gttccacagaacccaacaac

SEQ ID NO: 3188 - RNA, 20 nt, synthetic construct
  source 1..20: mol_type = other RNA
ttcctacctgagccatctcc

SEQ ID NO: 3189 - RNA, 20 nt, synthetic construct
  source 1..20: mol_type = other RNA
atgctcacatgaagaagatg

SEQ ID NO: 3190 - RNA, 20 nt, synthetic construct
  source 1..20: mol_type = other RNA
gggaaacaagagaccagagc

SEQ ID NO: 3191 - RNA, 20 nt, synthetic construct
  source 1..20: mol_type = other RNA
tcactctgatgggagacacc

SEQ ID NO: 3192 - RNA, 20 nt, synthetic construct
  source 1..20: mol_type = other RNA
cactctgatgggagacacca

SEQ ID NO: 3193 - RNA, 20 nt, synthetic construct
  source 1..20: mol_type = other RNA
tttcttatggagaggaaaga

SEQ ID NO: 3194 - RNA, 20 nt, synthetic construct
  source 1..20: mol_type = other RNA
gtacaggtaagagcaacgcc

SEQ ID NO: 3195 - RNA, 20 nt, synthetic construct
  source 1..20: mol_type = other RNA
ttacctgtaccataaccagg

SEQ ID NO: 3196 - RNA, 20 nt, synthetic construct
  source 1..20: mol_type = other RNA
tgtatctgtaggaggagaag

SEQ ID NO: 3197 - RNA, 20 nt, synthetic construct
  source 1..20: mol_type = other RNA
gtatctgtaggaggagaagt

SEQ ID NO: 3198 - RNA, 20 nt, synthetic construct
  source 1..20: mol_type = other RNA
cagatacaaactggactctc

SEQ ID NO: 3199 - RNA, 20 nt, synthetic construct
  source 1..20: mol_type = other RNA
tcttaccttccttcgtttgc

SEQ ID NO: 3200 - RNA, 20 nt, synthetic construct
  source 1..20: mol_type = other RNA
tttggatctaaaacggtgac

SEQ ID NO: 3201 - RNA, 20 nt, synthetic construct
  source 1..20: mol_type = other RNA
gatctaaaacggtgacaggt

SEQ ID NO: 3202 - RNA, 20 nt, synthetic construct
  source 1..20: mol_type = other RNA
aaaggctcagcagttgacct

SEQ ID NO: 3203 - RNA, 20 nt, synthetic construct
  source 1..20: mol_type = other RNA
atttaccggcatagaatagt

SEQ ID NO: 3204 - RNA, 20 nt, synthetic construct
  source 1..20: mol_type = other RNA
tcactgcctaagagagacat

SEQ ID NO: 3205 - RNA, 20 nt, synthetic construct
  source 1..20: mol_type = other RNA
aggatccacgtggagaatgg

SEQ ID NO: 3206 - RNA, 20 nt, synthetic construct
  source 1..20: mol_type = other RNA
ggatccacgtggagaatggt

SEQ ID NO: 3207 - RNA, 20 nt, synthetic construct
  source 1..20: mol_type = other RNA
tctcactgttctcagggaag

SEQ ID NO: 3208 - RNA, 20 nt, synthetic construct
  source 1..20: mol_type = other RNA
cctgcccaaggcttcccacc

SEQ ID NO: 3209 - RNA, 20 nt, synthetic construct
  source 1..20: mol_type = other RNA
ctgcccaaggcttcccacct

SEQ ID NO: 3210 - RNA, 20 nt, synthetic construct
  source 1..20: mol_type = other RNA
gcctgctgcggtaagcggta

SEQ ID NO: 3211 - RNA, 20 nt, synthetic construct
  source 1..20: mol_type = other RNA
gatgctcagggaacacgtat

SEQ ID NO: 3212 - RNA, 20 nt, synthetic construct
  source 1..20: mol_type = other RNA
ttctcaaagttcccacatcc

SEQ ID NO: 3213 - RNA, 20 nt, synthetic construct
  source 1..20: mol_type = other RNA
tcacagattggtgagtagcc

SEQ ID NO: 3214 - RNA, 20 nt, synthetic construct
  source 1..20: mol_type = other RNA
ctcacctgttctgtgattac

SEQ ID NO: 3215 - RNA, 20 nt, synthetic construct
  source 1..20: mol_type = other RNA
tccttccagctactcaatcc

SEQ ID NO: 3216 - RNA, 20 nt, synthetic construct
  source 1..20: mol_type = other RNA
cacagtacaaataagagccc

SEQ ID NO: 3217 - RNA, 20 nt, synthetic construct
  source 1..20: mol_type = other RNA
ccccccagcgcttcggtgag

SEQ ID NO: 3218 - RNA, 20 nt, synthetic construct
  source 1..20: mol_type = other RNA
cccccagcgcttcggtgagt

SEQ ID NO: 3219 - RNA, 20 nt, synthetic construct
  source 1..20: mol_type = other RNA
ccactcaccgaagcgctggg

SEQ ID NO: 3220 - RNA, 20 nt, synthetic construct
  source 1..20: mol_type = other RNA
tacctcggaggaaagagaaa

SEQ ID NO: 3221 - RNA, 20 nt, synthetic construct
  source 1..20: mol_type = other RNA
cagcttccaaaacgacaagc

SEQ ID NO: 3222 - RNA, 20 nt, synthetic construct
  source 1..20: mol_type = other RNA
aacataccagcttgtcgttt

SEQ ID NO: 3223 - RNA, 20 nt, synthetic construct
  source 1..20: mol_type = other RNA
agaccacctgcagagacgag

SEQ ID NO: 3224 - RNA, 20 nt, synthetic construct
  source 1..20: mol_type = other RNA
ccacctgcagagacgagagg

SEQ ID NO: 3225 - RNA, 20 nt, synthetic construct
  source 1..20: mol_type = other RNA
ccacacccaaaaggccacac

SEQ ID NO: 3226 - RNA, 20 nt, synthetic construct
  source 1..20: mol_type = other RNA
cccaccagctcagctccacg

SEQ ID NO: 3227 - RNA, 20 nt, synthetic construct
  source 1..20: mol_type = other RNA
cgctgtcaagtccagttcta

SEQ ID NO: 3228 - RNA, 20 nt, synthetic construct
  source 1..20: mol_type = other RNA
gctgtcaagtccagttctac

SEQ ID NO: 3229 - RNA, 20 nt, synthetic construct
  source 1..20: mol_type = other RNA
cacccagatcgtcagcgccg

SEQ ID NO: 3230 - RNA, 20 nt, synthetic construct
  source 1..20: mol_type = other RNA
ccactcacctgctctacccc

SEQ ID NO: 3231 - RNA, 20 nt, synthetic construct
  source 1..20: mol_type = other RNA
ccacagtctgaaagaaagca

SEQ ID NO: 3232 - RNA, 20 nt, synthetic construct
  source 1..20: mol_type = other RNA
gacactgttggcacggagga

SEQ ID NO: 3233 - RNA, 20 nt, synthetic construct
  source 1..20: mol_type = other RNA
ttaccatggccatcaacaca

SEQ ID NO: 3234 - RNA, 20 nt, synthetic construct
  source 1..20: mol_type = other RNA
ccacagtctgaaagaaaaca

SEQ ID NO: 3235 - RNA, 20 nt, synthetic construct
  source 1..20: mol_type = other RNA
cacagtctgaaagaaaacag

SEQ ID NO: 3236 - RNA, 20 nt, synthetic construct
  source 1..20: mol_type = other RNA
ttaccatggccatcagcacg

SEQ ID NO: 3237 - RNA, 20 nt, synthetic construct
  source 1..20: mol_type = other RNA
tctgcgttcaggggtaagcg

SEQ ID NO: 3238 - RNA, 20 nt, synthetic construct
  source 1..20: mol_type = other RNA
gcgcttacccctgaacgcag

SEQ ID NO: 3239 - RNA, 20 nt, synthetic construct
  source 1..20: mol_type = other RNA
gactgggcagcggcccctgt

SEQ ID NO: 3240 - RNA, 20 nt, synthetic construct
  source 1..20: mol_type = other RNA
ggactgggcagcggcccctg

SEQ ID NO: 3241 - RNA, 20 nt, synthetic construct
  source 1..20: mol_type = other RNA
gtcatgcagcccttgcctgc

SEQ ID NO: 3242 - RNA, 20 nt, synthetic construct
  source 1..20: mol_type = other RNA
tcatgcagcccttgcctgct

SEQ ID NO: 3243 - RNA, 20 nt, synthetic construct
  source 1..20: mol_type = other RNA
catgcagcccttgcctgctg

SEQ ID NO: 3244 - RNA, 20 nt, synthetic construct
  source 1..20: mol_type = other RNA
ctcaccagattcccgaaggt

SEQ ID NO: 3245 - RNA, 20 nt, synthetic construct
  source 1..20: mol_type = other RNA
cagactcaccagattcccga

SEQ ID NO: 3246 - RNA, 20 nt, synthetic construct
  source 1..20: mol_type = other RNA
agcctaggcaagtgcagagg

SEQ ID NO: 3247 - RNA, 20 nt, synthetic construct
  source 1..20: mol_type = other RNA
cagcctaggcaagtgcagag

SEQ ID NO: 3248 - RNA, 20 nt, synthetic construct
  source 1..20: mol_type = other RNA
accagcctaggcaagtgcag

SEQ ID NO: 3249 - RNA, 20 nt, synthetic construct
  source 1..20: mol_type = other RNA
tggaaccccaataccagcct

SEQ ID NO: 3250 - RNA, 20 nt, synthetic construct
  source 1..20: mol_type = other RNA
cacctgcagaagatgccaga

SEQ ID NO: 3251 - RNA, 20 nt, synthetic construct
  source 1..20: mol_type = other RNA
cgctcacctgcaccagcctc

SEQ ID NO: 3252 - RNA, 20 nt, synthetic construct
  source 1..20: mol_type = other RNA
cttcctggcaagacacaaga

SEQ ID NO: 3253 - RNA, 20 nt, synthetic construct
  source 1..20: mol_type = other RNA
aattcagggagccattgaaa

SEQ ID NO: 3254 - RNA, 20 nt, synthetic construct
  source 1..20: mol_type = other RNA
ctactgacctgccttttcaa

SEQ ID NO: 3255 - RNA, 20 nt, synthetic construct
  source 1..20: mol_type = other RNA
gcctctcaaagtcttatgtg

SEQ ID NO: 3256 - RNA, 20 nt, synthetic construct
  source 1..20: mol_type = other RNA
ttcccatgctgctttacttc

SEQ ID NO: 3257 - RNA, 20 nt, synthetic construct
  source 1..20: mol_type = other RNA
tttaggtcaaccagatgtag

SEQ ID NO: 3258 - RNA, 20 nt, synthetic construct
  source 1..20: mol_type = other RNA
tgtgcctgaaagcaaaaatg

SEQ ID NO: 3259 - RNA, 20 nt, synthetic construct
  source 1..20: mol_type = other RNA
ttacctactattcttgccag

SEQ ID NO: 3260 - RNA, 20 nt, synthetic construct
  source 1..20: mol_type = other RNA
aaatgctgtttaaaaaaagg

SEQ ID NO: 3261 - RNA, 20 nt, synthetic construct
  source 1..20: mol_type = other RNA
ccccaaaaagtgaatatcaa

SEQ ID NO: 3262 - RNA, 20 nt, synthetic construct
  source 1..20: mol_type = other RNA
cgcggcgcagtacccgctgc

SEQ ID NO: 3263 - RNA, 20 nt, synthetic construct
  source 1..20: mol_type = other RNA
cactcaccgtggtgggtcgg

SEQ ID NO: 3264 - RNA, 20 nt, synthetic construct
  source 1..20: mol_type = other RNA
actcaccgtggtgggtcgga

SEQ ID NO: 3265 - RNA, 20 nt, synthetic construct
  source 1..20: mol_type = other RNA
tggctccctgtggggcaacg

SEQ ID NO: 3266 - RNA, 20 nt, synthetic construct
  source 1..20: mol_type = other RNA
gattccagggggaggcggtg

SEQ ID NO: 3267 - RNA, 20 nt, synthetic construct
  source 1..20: mol_type = other RNA
gctcctacctgtgctggacc

SEQ ID NO: 3268 - RNA, 20 nt, synthetic construct
  source 1..20: mol_type = other RNA
tcgccgccacagtggggtcg

SEQ ID NO: 3269 - RNA, 20 nt, synthetic construct
  source 1..20: mol_type = other RNA
cagactgagagtggggagag

SEQ ID NO: 3270 - RNA, 20 nt, synthetic construct
  source 1..20: mol_type = other RNA
cctcctccagagtgtggttg

SEQ ID NO: 3271 - RNA, 20 nt, synthetic construct
  source 1..20: mol_type = other RNA
agccatcccagggagagagc

SEQ ID NO: 3272 - RNA, 20 nt, synthetic construct
  source 1..20: mol_type = other RNA
gccatcccagggagagagct

SEQ ID NO: 3273 - RNA, 20 nt, synthetic construct
  source 1..20: mol_type = other RNA
ccatcccagggagagagctg

SEQ ID NO: 3274 - RNA, 20 nt, synthetic construct
  source 1..20: mol_type = other RNA
ctcacaggccacccaccagc

SEQ ID NO: 3275 - RNA, 20 nt, synthetic construct
  source 1..20: mol_type = other RNA
ccgcttccagaagtgcctgg

SEQ ID NO: 3276 - RNA, 20 nt, synthetic construct
  source 1..20: mol_type = other RNA
cttccagaagtgcctggcgg

SEQ ID NO: 3277 - RNA, 20 nt, synthetic construct
  source 1..20: mol_type = other RNA
acaactgcaaaggaatgggt

SEQ ID NO: 3278 - RNA, 20 nt, synthetic construct
  source 1..20: mol_type = other RNA
caactgcaaaggaatgggta

SEQ ID NO: 3279 - RNA, 20 nt, synthetic construct
  source 1..20: mol_type = other RNA
gaactaggaagacggtccag

SEQ ID NO: 3280 - RNA, 20 nt, synthetic construct
  source 1..20: mol_type = other RNA
ggctgaccaggacctgttgc

SEQ ID NO: 3281 - RNA, 20 nt, synthetic construct
  source 1..20: mol_type = other RNA
ctcacctgtacgccaggcgg

SEQ ID NO: 3282 - RNA, 20 nt, synthetic construct
  source 1..20: mol_type = other RNA
gctctcacctgtacgccagg

SEQ ID NO: 3283 - RNA, 20 nt, synthetic construct
  source 1..20: mol_type = other RNA
cttagacctggcaggcagat

SEQ ID NO: 3284 - RNA, 20 nt, synthetic construct
  source 1..20: mol_type = other RNA
caatccagtccccgaagcca

SEQ ID NO: 3285 - RNA, 20 nt, synthetic construct
  source 1..20: mol_type = other RNA
aatccagtccccgaagccac

SEQ ID NO: 3286 - RNA, 20 nt, synthetic construct
  source 1..20: mol_type = other RNA
actcaccggtgatgaggaca

SEQ ID NO: 3287 - RNA, 20 nt, synthetic construct
  source 1..20: mol_type = other RNA
ctcaccggtgatgaggacaa

SEQ ID NO: 3288 - RNA, 20 nt, synthetic construct
  source 1..20: mol_type = other RNA
ccggtctgcgggaagggtac

SEQ ID NO: 3289 - RNA, 20 nt, synthetic construct
  source 1..20: mol_type = other RNA
tgggctgcaggagccgcggc

SEQ ID NO: 3290 - RNA, 20 nt, synthetic construct
  source 1..20: mol_type = other RNA
ttgtaccaaatgcccctgtc

SEQ ID NO: 3291 - RNA, 20 nt, synthetic construct
  source 1..20: mol_type = other RNA
cggacagcagtcctccatta

SEQ ID NO: 3292 - RNA, 20 nt, synthetic construct
  source 1..20: mol_type = other RNA
aggtgcagcacagccccatg

SEQ ID NO: 3293 - RNA, 20 nt, synthetic construct
  source 1..20: mol_type = other RNA
ggtgcagcacagccccatgt

SEQ ID NO: 3294 - RNA, 20 nt, synthetic construct
  source 1..20: mol_type = other RNA
agttgccagatgcgcttcga

SEQ ID NO: 3295 - RNA, 20 nt, synthetic construct
  source 1..20: mol_type = other RNA
gttgccagatgcgcttcgac

SEQ ID NO: 3296 - RNA, 20 nt, synthetic construct
  source 1..20: mol_type = other RNA
gtctcagctgctcgacacgc

SEQ ID NO: 3297 - RNA, 20 nt, synthetic construct
  source 1..20: mol_type = other RNA
ttcttaccctggaatagtcc

SEQ ID NO: 3298 - RNA, 20 nt, synthetic construct
  source 1..20: mol_type = other RNA
attacctgtatgctaatcga

SEQ ID NO: 3299 - RNA, 20 nt, synthetic construct
  source 1..20: mol_type = other RNA
ttgcaatgcgttcgtggctt

SEQ ID NO: 3300 - RNA, 20 nt, synthetic construct
  source 1..20: mol_type = other RNA
actgacctgtgaccatagcc

SEQ ID NO: 3301 - RNA, 20 nt, synthetic construct
  source 1..20: mol_type = other RNA
tatctgcagggacagagaaa

SEQ ID NO: 3302 - RNA, 20 nt, synthetic construct
  source 1..20: mol_type = other RNA
tgcggcgcagacatacagct

SEQ ID NO: 3303 - RNA, 20 nt, synthetic construct
  source 1..20: mol_type = other RNA
ccccgcaggcgggggcgtta

SEQ ID NO: 3304 - RNA, 20 nt, synthetic construct
  source 1..20: mol_type = other RNA
tttcagaagtgtctcagtgt

SEQ ID NO: 3305 - RNA, 20 nt, synthetic construct
  source 1..20: mol_type = other RNA
attacctgatggaaagtctg

SEQ ID NO: 3306 - RNA, 20 nt, synthetic construct
  source 1..20: mol_type = other RNA
cttcagtgccttcgtggatt

SEQ ID NO: 3307 - RNA, 20 nt, synthetic construct
  source 1..20: mol_type = other RNA
tttctgcagagggatagaga

SEQ ID NO: 3308 - RNA, 20 nt, synthetic construct
  source 1..20: mol_type = other RNA
agaccaccagagtaagggac

SEQ ID NO: 3309 - RNA, 20 nt, synthetic construct
  source 1..20: mol_type = other RNA
acttgcagccctcggccaaa

SEQ ID NO: 3310 - RNA, 20 nt, synthetic construct
  source 1..20: mol_type = other RNA
gcttgcagctgtgggacacc

SEQ ID NO: 3311 - RNA, 20 nt, synthetic construct
  source 1..20: mol_type = other RNA
gaccactcaaccagtgccca

SEQ ID NO: 3312 - RNA, 20 nt, synthetic construct
  source 1..20: mol_type = other RNA
ggaggcacagaccactccac

SEQ ID NO: 3313 - RNA, 20 nt, synthetic construct
  source 1..20: mol_type = other RNA
ggcacagacaactcgactga

SEQ ID NO: 3314 - RNA, 20 nt, synthetic construct
  source 1..20: mol_type = other RNA
gcacagaccactcaacccac

SEQ ID NO: 3315 - RNA, 20 nt, synthetic construct
  source 1..20: mol_type = other RNA
gaccactcaacccacaggcc

SEQ ID NO: 3316 - RNA, 20 nt, synthetic construct
  source 1..20: mol_type = other RNA
gaccactcaaaccacagcca

SEQ ID NO: 3317 - RNA, 20 nt, synthetic construct
  source 1..20: mol_type = other RNA
gaccactcaacccacagcca

SEQ ID NO: 3318 - RNA, 20 nt, synthetic construct
  source 1..20: mol_type = other RNA
gaccactcaaccagcagcca

SEQ ID NO: 3319 - RNA, 20 nt, synthetic construct
  source 1..20: mol_type = other RNA
tttactatgtctcagtggat

SEQ ID NO: 3320 - RNA, 20 nt, synthetic construct
  source 1..20: mol_type = other RNA
ctttactatgtctcagtgga

SEQ ID NO: 3321 - RNA, 20 nt, synthetic construct
  source 1..20: mol_type = other RNA
agccagaagctgggaatttc

SEQ ID NO: 3322 - RNA, 20 nt, synthetic construct
  source 1..20: mol_type = other RNA
tatcatgtcgttattaactg

SEQ ID NO: 3323 - RNA, 20 nt, synthetic construct
  source 1..20: mol_type = other RNA
cacctacctaagaaccatcc

SEQ ID NO: 3324 - RNA, 20 nt, synthetic construct
  source 1..20: mol_type = other RNA
ggacccagactagcagcacc

SEQ ID NO: 3325 - DNA, 23 bp, synthetic construct
  source 1..23: mol_type = other DNA
tgacggccatcctcggcgtctgg

SEQ ID NO: 3326 - DNA, 23 bp, synthetic construct
  source 1..23: mol_type = other DNA
gacggccatcctcggcgtctggg

SEQ ID NO: 3327 - DNA, 23 bp, synthetic construct
  source 1..23: mol_type = other DNA
acggccatcctcggcgtctgggg

SEQ ID NO: 3328 - DNA, 23 bp, synthetic construct
  source 1..23: mol_type = other DNA
cgcactcacccgcccaggtctgg

SEQ ID NO: 3329 - DNA, 23 bp, synthetic construct
  source 1..23: mol_type = other DNA
gcactcacccgcccaggtctggg

SEQ ID NO: 3330 - DNA, 22 bp, synthetic construct
  source 1..22: mol_type = other DNA
cccaggctcgcactccatgagg

SEQ ID NO: 3331 - DNA, 23 bp, synthetic construct
  source 1..23: mol_type = other DNA
gtcactcaccggcctcgctctgg

SEQ ID NO: 3332 - DNA, 23 bp, synthetic construct
  source 1..23: mol_type = other DNA
ccttaccccatctcagggtgagg

SEQ ID NO: 3333 - DNA, 23 bp, synthetic construct
  source 1..23: mol_type = other DNA
cttaccccatctcagggtgaggg

SEQ ID NO: 3334 - DNA, 23 bp, synthetic construct
  source 1..23: mol_type = other DNA
ggctctgggaaaagaggggaagg

SEQ ID NO: 3335 - DNA, 23 bp, synthetic construct
  source 1..23: mol_type = other DNA
cttcccacagatagaaaaggagg

SEQ ID NO: 3336 - DNA, 23 bp, synthetic construct
  source 1..23: mol_type = other DNA
ttcccacagatagaaaaggaggg

SEQ ID NO: 3337 - DNA, 23 bp, synthetic construct
  source 1..23: mol_type = other DNA
cccaggcagtgacagtgcccagg

SEQ ID NO: 3338 - DNA, 23 bp, synthetic construct
  source 1..23: mol_type = other DNA
ccaggcagtgacagtgcccaggg

SEQ ID NO: 3339 - DNA, 23 bp, synthetic construct
  source 1..23: mol_type = other DNA
gacccgcatctcggcgtctgagg

SEQ ID NO: 3340 - DNA, 23 bp, synthetic construct
  source 1..23: mol_type = other DNA
gcactcaccggcccaggtctcgg

SEQ ID NO: 3341 - DNA, 23 bp, synthetic construct
  source 1..23: mol_type = other DNA
tgggagcctgggggcgaggaggg

SEQ ID NO: 3342 - DNA, 23 bp, synthetic construct
  source 1..23: mol_type = other DNA
gggagcctgggggcgaggagggg

SEQ ID NO: 3343 - DNA, 23 bp, synthetic construct
  source 1..23: mol_type = other DNA
ccccaggctcccactccatgagg

SEQ ID NO: 3344 - DNA, 23 bp, synthetic construct
  source 1..23: mol_type = other DNA
ttaccccatctcagggtgagggg

SEQ ID NO: 3345 - DNA, 23 bp, synthetic construct
  source 1..23: mol_type = other DNA
ttcccacaggtggaaaaggaggg

SEQ ID NO: 3346 - DNA, 23 bp, synthetic construct
  source 1..23: mol_type = other DNA
tgacccgcatctcggcgtctggg

SEQ ID NO: 3347 - DNA, 23 bp, synthetic construct
  source 1..23: mol_type = other DNA
gcactcacaggcccaggtctcgg

SEQ ID NO: 3348 - DNA, 23 bp, synthetic construct
  source 1..23: mol_type = other DNA
cacaggcccaggtctcggtcagg

SEQ ID NO: 3349 - DNA, 23 bp, synthetic construct
  source 1..23: mol_type = other DNA
agaccctggccccgcccccgtgg

SEQ ID NO: 3350 - DNA, 23 bp, synthetic construct
  source 1..23: mol_type = other DNA
ggctctgggaaaggaggggaagg

SEQ ID NO: 3351 - DNA, 23 bp, synthetic construct
  source 1..23: mol_type = other DNA
cccagccagcaacagtgcccagg

SEQ ID NO: 3352 - DNA, 26 bp, synthetic construct
  source 1..26: mol_type = other DNA
attgggaccgggagacacagaagtac

SEQ ID NO: 3353 - DNA, 26 bp, synthetic construct
  source 1..26: mol_type = other DNA
attacatcgccctgaacgaggacctg

SEQ ID NO: 3354 - DNA, 26 bp, synthetic construct
  source 1..26: mol_type = other DNA
attacatcgccctgaacgaggatctg

SEQ ID NO: 3355 - DNA, 26 bp, synthetic construct
  source 1..26: mol_type = other DNA
attgttgctggcctggctgtcctagc

SEQ ID NO: 3356 - DNA, 26 bp, synthetic construct
  source 1..26: mol_type = other DNA
attacatcgccctgaacgaggacctg

SEQ ID NO: 3357 - protein, 1802 aa, Homo sapiens
MKPQIRDHRPNPMEAMYPHIFYFHFENLEKAYGRNETWLCFTVEIIKQYLPVPWKKGVFRNQVDPETHCHAEKCFLSWFCNNTLSPKKNYQVTWYTSWSPCPECAGEVAEFLAEHSNVKLTIYTARLYYFWDTDYQEGLRSLSEEGASVEIMDYEDFQYCWENFVYDDGEPFKRWKGLKYNFQSLTRRLREILQSGGSSGGSSGSETPGTSESATPESSGGSSGGSDKKYSIGLAIGTNSVGWAVITDEYKVPSKKFKVLGNTDRHSIKKNLIGALLFDSGETAEATRLKRTARRRYTRRKNRICYLQEIFSNEMAKVDDSFFHRLEESFLVEEDKKHERHPIFGNIVDEVAYHEKYPTIYHLRKKLVDSTDKADLRLIYLALAHMIKFRGHFLIEGDLNPDNSDVDKLFIQLVQTYNQLFEENPINASGVDAKAILSARLSKSRRLENLIAQLPGEKKNGLFGNLIALSLGLTPNFKSNFDLAEDAKLQLSKDTYDDDLDNLLAQIGDQYADLFLAAKNLSDAILLSDILRVNTEITKAPLSASMIKRYDEHHQDLTLLKALVRQQLPEKYKEIFFDQSKNGYAGYIDGGASQEEFYKFIKPILEKMDGTEELLVKLNREDLLRKQRTFDNGSIPHQIHLGELHAILRRQEDFYPFLKDNREKIEKILTFRIPYYVGPLARGNSRFAWMTRKSEETITPWNFEEVVDKGASAQSFIERMTNFDKNLPNEKVLPKHSLLYEYFTVYNELTKVKYVTEGMRKPAFLSGEQKKAIVDLLFKTNRKVTVKQLKEDYFKKIECFDSVEISGVEDRFNASLGTYHDLLKIIKDKDFLDNEENEDILEDIVLTLTLFEDREMIEERLKTYAHLFDDKVMKQLKRRRYTGWGRLSRKLINGIRDKQSGKTILDFLKSDGFANRNFMQLIHDDSLTFKEDIQKAQVSGQGDSLHEHIANLAGSPAIKKGILQTVKVVDELVKVMGRHKPENIVIEMARENQTTQKGQKNSRERMKRIEEGIKELGSQILKEHPVENTQLQNEKLYLYYLQNGRDMYVDQELDINRLSDYDVDHIVPQSFLKDDSIDNKVLTRSDKNRGKSDNVPSEEVVKKMKNYWRQLLNAKLITQRKFDNLTKAERGGLSELDKAGFIKRQLVETRQITKHVAQILDSRMNTKYDENDKLIREVKVITLKSKLVSDFRKDFQFYKVREINNYHHAHDAYLNAVVGTALIKKYPKLESEFVYGDYKVYDVRKMIAKSEQEIGKATAKYFFYSNIMNFFKTEITLANGEIRKRPLIETNGETGEIVWDKGRDFATVRKVLSMPQVNIVKKTEVQTGGFSKESILPKRNSDKLIARKKDWDPKKYGGFDSPTVAYSVLVVAKVEKGKSKKLKSVKELLGITIMERSSFEKNPIDFLEAKGYKEVKKDLIIKLPKYSLFELENGRKRMLASAGELQKGNELALPSKYVNFLYLASHYEKLKGSPEDNEQKQLFVEQHKHYLDEIIEQISEFSKRVILADANLDKVLSAYNKHRDKPIREQAENIIHLFTLTNLGAPAAFKYFDTTIDRKRYTSTKEVLDATLIHQSITGLYETRIDLSQLGGDSGGSGGSGGSTNLSDIIEKETGKQLVIQESILMLPEEVEEVIGNKPESDILVHTAYDESTDENVMLLTSDAPEYKPWALVIQDSNGENKIKMLSGGSGGSGGSTNLSDIIEKETGKQLVIQESILMLPEEVEEVIGNKPESDILVHTAYDESTDENVMLLTSDAPEYKPWALVIQDSNGENKIKMLSGGSKRTADGSEFESPKKKRKVE

SEQ ID NO: 3358 - DNA, 303 bp, synthetic construct
  source 1..303: mol_type = other DNA
tgcctgagctacgataccgagatcctgaccgtggaatacggcttcctgcctatcggcaagatcgtcgaggaacggatcgagtgcacagtgtacaccgtggataagaatggcttcgtgtacacccagcctatcgctcagtggcacaacagaggcgagcaagaggtgttcgagtactgcctggaagatggcagcatcatccgggccaccaaggaccacaagtttatgaccaccgacggccagatgctgcccatcgacgagatctttgagagaggcctggacctgaaacaggtggacggactgcct

SEQ ID NO: 3359 - protein, 101 aa, synthetic construct; identical to SEQ ID NO: 375

SEQ ID NO: 3360 - DNA, 264 bp, synthetic construct
  source 1..264: mol_type = other DNA
tgtctggacctcaagacccaagtgcagacacctcagggcatgaaagagattagcaatatccaggtgggcgacctggtcctgagcaacaccggctacaacgaggtgctgaacgtgttccctaagtccaagaagaaatcttataagatcaccctggaagatggcaaggaaatcatctgcagcgaggaacacctgttccccacccagaccggcgagatgaacatcagcggcggactgaaggagggcatgtgcctgtacgtgaaggag

SEQ ID NO: 3361 - protein, 88 aa, synthetic construct
CLDLKTQVQTPQGMKEISNIQVGDLVLSNTGYNEVLNVFPKSKKKSYKITLEDGKEIICSEEHLFPTQTGEMNISGGLKEGMCLYVKE

SEQ ID NO: 3362 - DNA, 267 bp, synthetic construct
  source 1..267: mol_type = other DNA
tgcctgagcctggacaccatggtggtgacaaacggcaaggccatcgagatcagagatgtgaaggtgggagattggctggaaagcgaatgtggcccagtgcaggttacagaggtgctgcctatcatcaagcagcctgtctttgagattgtgctgaaaagcggaaaaaagatccgggtgtccgctaatcacaagttccccaccaaggacggcctcaagaccatcaacagcggcctgaaggtgggcgacttcctgagaagcagagccaag

SEQ ID NO: 3363 - protein, 89 aa, synthetic construct
CLSLDTMVVTNGKAIEIRDVKVGDWLESECGPVQVTEVLPIIKQPVFEIVLKSGKKIRVSANHKFPTKDGLKTINSGLKVGDFLRSRAK

SEQ ID NO: 3364 - DNA, 303 bp, synthetic construct
  source 1..303: mol_type = other DNA
tgttttgtgcctggcaccctggtgaacacagagaatggcctgaagaaaatcgaggaaatcaaggtgggcgacaaggtgttcagccatacaggcaagctgcaggaggtggtggacaccctgatcttcgaccgggacgaggaaatcatctctatcaacggcattgattgcaccaagaaccacgagttctacgtgatcgataaggaaaacgctaatagagtgaacgaggacaacatccacctcttcgccagatgggtccacgccgaggaactggatatgaaaaagcacctgctgatcgagctggaa

SEQ ID NO: 3365 - protein, 101 aa, synthetic construct
CFVPGTLVNTENGLKKIEEIKVGDKVFSHTGKLQEVVDTLIFDRDEEIISINGIDCTKNHEFYVIDKENANRVNEDNIHLFARWVHAEELDMKKHLLIELE

SEQ ID NO: 3366 - DNA, 315 bp, synthetic construct
  source 1..315: mol_type = other DNA
tgcctggtgggctctagcgagattatcacaagaaactacggcaagaccaccatcaaggaagtggtcgagatcttcgacaacgacaagaatatccaggtgctggccttcaacacccacaccgataatatcgagtgggcccctatcaaggccgctcagctgaccagacctaacgccgagctggttgaactggaaatcgacaccctgcacggcgtgaaaacaatccggtgcacccctgaccaccccgtgtacaccaagaacagaggctacgtgcgggccgacgagctgacagatgatgacgagctcgtggtggctatc

SEQ ID NO: 3367 - protein, 105 aa, synthetic construct
CLVGSSEIITRNYGKTTIKEVVEIFDNDKNIQVLAFNTHTDNIEWAPIKAAQLTRPNAELVELEIDTLHGVKTIRCTPDHPVYTKNRGYVRADELTDDDELVVAI

SEQ ID NO: 3368 - DNA, 306 bp, synthetic construct
  source 1..306: mol_type = other DNA
tgcctgagctacgagacagagatcctgaccgtggaatatggcctgctgccaatcggaaagatcgtggaaaagcggatcgagtgcaccgtctacagcgtggacaacaacggaaatatctatacacagcctgtggcccaatggcacgaccggggcgaacaggaggtgtttgagtactgcctggaagatggttctctgattagagccaccaaggaccacaagttcatgaccgtcgacggccagatgctgcccatcgacgaaatcttcgagcgggaactcgacctgatgagagtggataacctgcccaat

SEQ ID NO: 3369 - protein, 102 aa, synthetic construct; identical to SEQ ID NO: 371

SEQ ID NO: 3370 - protein, 101 aa, synthetic construct; identical to SEQ ID NO: 375

SEQ ID NO: 3371 - protein, 102 aa, synthetic construct; identical to SEQ ID NO: 371

SEQ ID NO: 3372 - DNA, 279 bp, synthetic construct
  source 1..279: mol_type = other DNA
acaagaagcggatactgtctggacctcaagacccaagtgcagacacctcagggcatgaaagagattagcaatatccaggtgggcgacctggtcctgagcaacaccggctacaacgaggtgctgaacgtgttccctaagtccaagaagaaatcttataagatcaccctggaagatggcaaggaaatcatctgcagcgaggaacacctgttccccacccagaccggcgagatgaacatcagcggcggactgaaggagggcatgtgcctgtacgtgaaggag

SEQ ID NO: 3373 - protein, 93 aa, synthetic construct
TRSGYCLDLKTQVQTPQGMKEISNIQVGDLVLSNTGYNEVLNVFPKSKKKSYKITLEDGKEIICSEEHLFPTQTGEMNISGGLKEGMCLYVKE

SEQ ID NO: 3374 - DNA, 282 bp, synthetic construct
  source 1..282: mol_type = other DNA
tctcagctgaaccggtgcctgagcctggacaccatggtggtgacaaacggcaaggccatcgagatcagagatgtgaaggtgggagattggctggaaagcgaatgtggcccagtgcaggttacagaggtgctgcctatcatcaagcagcctgtctttgagattgtgctgaaaagcggaaaaaagatccgggtgtccgctaatcacaagttccccaccaaggacggcctcaagaccatcaacagcggcctgaaggtgggcgacttcctgagaagcagagccaag

SEQ ID NO: 3375 - protein, 94 aa, synthetic construct
SQLNRCLSLDTMVVTNGKAIEIRDVKVGDWLESECGPVQVTEVLPIIKQPVFEIVLKSGKKIRVSANHKFPTKDGLKTINSGLKVGDFLRSRAK

SEQ ID NO: 3376 - DNA, 318 bp, synthetic construct
  source 1..318: mol_type = other DNA
ggcatcggcggaggatgttttgtgcctggcaccctggtgaacacagagaatggcctgaagaaaatcgaggaaatcaaggtgggcgacaaggtgttcagccatacaggcaagctgcaggaggtggtggacaccctgatcttcgaccgggacgaggaaatcatctctatcaacggcattgattgcaccaagaaccacgagttctacgtgatcgataaggaaaacgctaatagagtgaacgaggacaacatccacctcttcgccagatgggtccacgccgaggaactggatatgaaaaagcacctgctgatcgagctggaa

SEQ ID NO: 3377 - protein, 106 aa, synthetic construct
GIGGGCFVPGTLVNTENGLKKIEEIKVGDKVFSHTGKLQEVVDTLIFDRDEEIISINGIDCTKNHEFYVIDKENANRVNEDNIHLFARWVHAEELDMKKHLLIELE

SEQ ID NO: 3378 - DNA, 330 bp, synthetic construct
  source 1..330: mol_type = other DNA
ggaacaaacccatgttgcctggtgggctctagcgagattatcacaagaaactacggcaagaccaccatcaaggaagtggtcgagatcttcgacaacgacaagaatatccaggtgctggccttcaacacccacaccgataatatcgagtgggcccctatcaaggccgctcagctgaccagacctaacgccgagctggttgaactggaaatcgacaccctgcacggcgtgaaaacaatccggtgcacccctgaccaccccgtgtacaccaagaacagaggctacgtgcgggccgacgagctgacagatgatgacgagctcgtggtggctatc

SEQ ID NO: 3379 - protein, 110 aa, synthetic construct
GTNPCCLVGSSEIITRNYGKTTIKEVVEIFDNDKNIQVLAFNTHTDNIEWAPIKAAQLTRPNAELVELEIDTLHGVKTIRCTPDHPVYTKNRGYVRADELTDDDELVVAI

SEQ ID NO: 3380 - DNA, 105 bp, synthetic construct
  source 1..105: mol_type = other DNA
gtcaagatcatcagcagaaagagcctgggcacccagaacgtgtacgatatcggagtgggcgagccccacaactttctgctcaagaatggcctggtggccagcaac

SEQ ID NO: 3381 - protein, 35 aa, synthetic construct
VKIISRKSLGTQNVYDIGVGEPHNFLLKNGLVASN

SEQ ID NO: 3382 - DNA, 114 bp, synthetic construct
  source 1..114: mol_type = other DNA
atgatgctgaaaaagatcctgaagatcgaggaactggatgagagagagctgatcgacatcgaagtgtctggcaatcacctgttctacgccaacgacatcctgacccacaacagc

SEQ ID NO: 3383 - protein, 38 aa, synthetic construct
MMLKKILKIEELDERELIDIEVSGNHLFYANDILTHNS

SEQ ID NO: 3384 - DNA, 138 bp, synthetic construct
  source 1..138: mol_type = other DNA
atgtgcgaaatcttcgagaacgagattgattgggacgaaatcgcctctatcgagtacgtgggcgtggaagagacaatcgacatcaacgtgaccaacgacagactgtttttcgccaatggcatcctgacccacaacagc

SEQ ID NO: 3385 - protein, 46 aa, synthetic construct
MCEIFENEIDWDEIASIEYVGVEETIDINVTNDRLFFANGILTHNS

SEQ ID NO: 3386 - DNA, 123 bp, synthetic construct
  source 1..123: mol_type = other DNA
atgaaattcaagctgaaggaaatcaccagcatcgagacaaagcactacaagggcaaggtgcacgatctgaccgtgaaccaggaccacagctacaacgtcagaggcaccgtggtgcataattct

SEQ ID NO: 3387 - protein, 41 aa, synthetic construct
MKFKLKEITSIETKHYKGKVHDLTVNQDHSYNVRGTVVHNS

SEQ ID NO: 3388 - DNA, 123 bp, synthetic construct
  source 1..123: mol_type = other DNA
atggaagccaagacctacatcggcaagctgaaatctagaaagatcgtgtccaacgaggatacatacgacatccagaccagcacccacaatttcttcgccaacgacatcctggtgcacaacagc

SEQ ID NO: 3389 - protein, 41 aa, synthetic construct
MEAKTYIGKLKSRKIVSNEDTYDIQTSTHNFFANDILVHNS

SEQ ID NO: 3390 - DNA, 108 bp, synthetic construct
  source 1..108: mol_type = other DNA
atgatcaagatcgccacaagaaagtacctgggcaagcagaacgtgtacgacatcggcgtggagagagaccacaacttcgccctgaagaacggctttatcgcctctaat

SEQ ID NO: 3391 - protein, 36 aa, synthetic construct; identical to SEQ ID NO: 373

SEQ ID NO: 3392 - protein, 36 aa, synthetic construct
MVKIISRKSLGTQNVYDIGVGEPHNFLLKNGLVASN

SEQ ID NO: 3393 - protein, 35 aa, synthetic construct
IKIATRKYLGKQNVYDIGVERDHNFALKNGFIASN

SEQ ID NO: 3394 - DNA, 88 bp, synthetic construct
  source 1..88: mol_type = other DNA; note = SaCas9 scaffold sequence
gttttagtactctgtaatgaaaattacagaatctactaaaacaaggcaaaatgccgtgtttatctcgtcaacttgttggcgagatttt

What is claimed:

1. A method for producing a functionally enhanced and/or lineage stabilized regulatory T (T_{REG}) cell, the method comprising contacting a T_{REG} cell with a base editor, or one or more polynucleotides encoding the base editor, wherein the base editor comprises a polynucleotide programmable DNA binding polypeptide (napDNAbp), and a deaminase, and one or more guide RNAs (gRNAs), or one or more polynucleotides encoding the gRNAs, wherein the one or more gRNAs target the base editor to effect an alteration in a nucleic acid molecule, wherein the nucleic acid molecule encodes a polypeptide and/or comprises a regulatory element associated with expression thereof, and wherein the polypeptide is selected from the group consisting of bone morphogenetic protein/retinoic acid-inducible neural-specific protein 1 (BRINP1), C terminus of HSC70-interacting protein (CHIP), Cluster of Differentiation 70 (CD70), c-JUN kinase 1 (JNK1), protein kinase C theta (PRKCQ), ring finger protein 20 (RNF20), and sirtuin 1 (SIRT1), thereby producing the functionally enhanced and/or lineage stabilized T_{REG} cell.

2. The method of claim 1, further comprising contacting the T_{REG} cell with a gRNA that targets the base editor to effect an alteration in a nucleic acid molecule, wherein the nucleic acid molecule encodes a polypeptide and/or comprises a regulatory element associated with expression thereof, and wherein the polypeptide is selected from the group consisting of beta-2 microglobulin (B2M), Cluster of Differentiation 58, and programmed cell death 1 (PD-1).

3. A method for producing a functionally enhanced and/or lineage stabilized regulatory T (T_{REG}) cell, the method comprising contacting a T_{REG} cell with a base editor, or one or more polynucleotide encoding the base editor, wherein the base editor comprises a polynucleotide programmable DNA binding polypeptide (napDNAbp), and a deaminase, and two or more guide RNAs (gRNAs), or one or more polynucleotides encoding the gRNAs, wherein each gRNA targets the base editor to effect an alteration in a nucleic acid molecule, wherein each nucleic acid molecule encodes a polypeptide and/or comprises a regulatory element associated with expression of the polypeptide, and wherein a first polypeptide is selected from the group consisting of bone morphogenetic protein/retinoic acid-inducible neural-specific protein 1 (BRINP1), C terminus of HSC70-interacting protein (CHIP), c-JUN kinase 1 (JNK1), protein kinase C theta (PRKCQ), ring finger protein 20 (RNF20), and sirtuin 1 (SIRT1), and wherein a second polypeptide is selected from the group consisting of Cluster of Differentiation 58 (CD58), Cluster of Differentiation 70 (CD70), and programmed cell death 1 (PD-1).

4. The method of claim 3 further comprising effecting an alteration in a third nucleic acid molecule, wherein the nucleic acid molecule encodes a beta-2 microglobulin (B2M) polypeptide and/or comprises a regulatory element associated with expression thereof.

5. The method of claim 4, wherein the method comprises contacting the T_{REG} cell with gRNAs comprising each of the following nucleotide sequences: TSBTx2813, TSBTx2817, TSBTx2834, TSBTx025, and TSBTx845 to thereby reduce or eliminate expression of each of CD70, SIRT1, CD58, PD-1, and B2M in the T_{REG} cell.

6. The method of claim 1, wherein the method comprises editing a combination of nucleic acid molecules encoding a combination of two or more polypeptides and/or a regulatory element associated with expression thereof, wherein the combination of polypeptides is selected from the group consisting of: SIRT1, PD-1, CD70, and CD58; SIRT1, PD-1, and CD70; SIRT1, PD-1, and CD58; SIRT1, CD70, and CD58; SIRT1 and PD-1; SIRT1 and CD70; SIRT1 and CD58; SIRT1, PD-1, CD70, CD58, and B2M; SIRT1, PD-1, CD70, and B2M; SIRT1, PD-1, CD58 and B2M; SIRT1, CD70, CD58, and B2M; SIRT1, PD-1, and B2M; SIRT1, CD70, and B2M; SIRT1, CD58, and B2M; RNF20, PD-1, CD70, and CD58; RNF20, PD-1, and CD70; RNF20, PD-1, and CD58; RNF20, CD70, and CD58; RNF20 and PD-1; RNF20 and CD70; RNF20 and CD58; RNF20, PD-1, CD70, CD58, and B2M; RNF20, PD-1, CD70, and B2M; RNF20, PD-1, CD58 and B2M; RNF20, CD70, CD58, and B2M; RNF20, PD-1, and B2M; RNF20, CD70, and B2M; RNF20, CD58, and B2M; SIRT1, RNF20, PD-1, CD70, and CD58; SIRT1, RNF20, PD-1, and CD70; SIRT1, RNF20, PD-1, and CD58; SIRT1, RNF20, CD70, and CD58; SIRT1, RNF20, and PD-1; SIRT1, RNF20, and CD70; SIRT1, RNF20, and CD58; SIRT1, RNF20, PD-1, CD70, CD58, and B2M; SIRT1, RNF20, PD-1, CD70, and B2M; SIRT1, RNF20, PD-1, CD58, and B2M; SIRT1, RNF20, CD70, CD58, and B2M; SIRT1, RNF20, PD-1, and B2M; SIRT1, RNF20, CD70, and B2M; and SIRT1, RNF20, CD58, and B2M.

7. The method of claim 1, wherein each guide RNA comprises a sequence selected from the group consisting of TSBTx2810, TSBTx2813, TSBTx2815, TSBTx2813, TSBTx2814, TSBTx2816, TSBTx2834, TSBTx845, TSBTx025, TSBTx2817, TSBTx2817, TSBTx2818, TSBTx2819, TSBTx2820, TSBTx2821, TSBTx2822, TSBTx2823, TSBTx2824, TSBTx2825, TSBTx2826, TSBTx2827, TSBTx2828, TSBTx2830, or TSBTx2831, TSBTx1680, TSBTx1681, TSBTx1682, TSBTx1683, TSBTx1684, TSBTx1685, TSBTx1686, TSBTx1687, TSBTx1688, TSBTx1689, TSBTx1690, TSBTx1691, TSBTx1692, TSBTx1693, TSBTx1694, TSBTx1695, TSBTx1696, TSBTx1697, TSBTx1698, or TSBTx2853, TSBTx2813, TSBTx2817, TSBTx2834, TSBTx025, and TSBTx845.

8. The method of claim 1, wherein:
the alteration is associated with a reduction of costimulation of a T_{CONV} cell by the functionally enhanced and/or lineage stabilized T_{REG} cell relative to a reference cell;
the deaminase is a cytidine deaminase or an adenosine deaminase;
the napDNAbp is Cas9 or Cas12;
the base editor further comprises one or more uracil glycosylase inhibitors (UGIs); and/or
the base editor further comprises one or more nuclear localization signals (NLS).

9. The method of claim 8, wherein the adenosine deaminase is ABE8.20.

10. The method of claim 1, further comprising expressing a chimeric antigen receptor (CAR) in the T_{REG} cell.

11. A method for producing a functionally enhanced and/or lineage stabilized regulatory T (T_{REG}) cell, the method comprising contacting a T_{REG} cell with a polynucleotide programmable DNA binding polypeptide (napDNAbp), or one or more polynucleotides encoding the napDNAbp, and one or more guide RNAs (gRNAs), or one or more polynucleotides encoding the gRNAs, that target the napDNAbp to cleave a target nucleic acid molecule and effect an alteration in the target nucleic acid molecule, wherein the target nucleic acid molecule encodes a polypeptide and/or comprises a regulatory element associated with expression thereof, and wherein the polypeptide is selected from the group consisting of bone morphogenetic protein/retinoic acid-inducible neural-specific protein 1 (BRINP1), C terminus of HSC70-interacting protein (CHIP), Cluster of Differentiation 70 (CD70), c-JUN kinase 1 (JNK1), protein kinase C theta (PRKCQ), ring finger protein 20 (RNF20), and sirtuin 1 (SIRT1), thereby producing the functionally enhanced and/or lineage stabilized T_{REG} cell.

12. A functionally enhanced and/or lineage stabilized regulatory T (T_{REG}) cell produced according to the method of claim 1.

13. A functionally enhanced and/or lineage stabilized regulatory T (T_{REG}) cell comprising a nucleobase alteration that reduces or eliminates expression of a polypeptide selected from the group consisting of bone morphogenetic protein/retinoic acid-inducible neural-specific protein 1 (BRINP1), C terminus of HSC70-interacting protein (CHIP), Cluster of Differentiation 70 (CD70), c-JUN kinase 1 (JNK1), protein kinase C theta (PRKCQ), ring finger protein 20 (RNF20), and sirtuin 1 (SIRT1).

14. The functionally enhanced and/or lineage stabilized regulatory T (T_{REG}) cell of claim 1, where the T_{REG} cell comprises a nucleobase alteration that reduces or eliminates expression of two or more polypeptides, wherein a first polypeptide is selected from the group consisting of bone morphogenetic protein/retinoic acid-inducible neural-specific protein 1 (BRINP1), C terminus of HSC70-interacting protein (CHIP), c-JUN kinase 1 (JNK1), protein kinase C theta (PRKCQ), ring finger protein 20 (RNF20), and sirtuin 1 (SIRT1), and wherein a second polypeptide is selected from the group consisting of Cluster of Differentiation 58 (CD58), Cluster of Differentiation 70 (CD70), and programmed cell death 1 (PD-1).

15. The functionally enhanced and/or lineage stabilized regulatory T (T_{REG}) cell of any claim 14, wherein the T_{REG} cell comprises an alteration that reduces or eliminates expression of a combination of polypeptides selected from the group consisting of: SIRT1, PD-1, CD70, and CD58; SIRT1, PD-1, and CD70; SIRT1, PD-1, and CD58; SIRT1, CD70, and CD58; SIRT1 and PD-1; SIRT1 and CD70; SIRT1 and CD58; SIRT1, PD-1, CD70, CD58, and B2M; SIRT1, PD-1, CD70, and B2M; SIRT1, PD-1, CD58 and B2M; SIRT1, CD70, CD58, and B2M; SIRT1, PD-1, and B2M; SIRT1, CD70, and B2M; SIRT1, CD58, and B2M; RNF20, PD-1, CD70, and CD58; RNF20, PD-1, and CD70; RNF20, PD-1, and CD58; RNF20, CD70, and CD58; RNF20 and PD-1; RNF20 and CD70; RNF20 and CD58; RNF20, PD-1, CD70, CD58, and B2M; RNF20, PD-1, CD70, and B2M; RNF20, PD-1, CD58 and B2M; RNF20, CD70, CD58, and B2M; RNF20, PD-1, and B2M; RNF20, CD70, and B2M; RNF20, CD58, and B2M; SIRT1, RNF20, PD-1, CD70, and CD58; SIRT1, RNF20, PD-1, and CD70; SIRT1, RNF20, PD-1, and CD58; SIRT1, RNF20, CD70, and CD58; SIRT1, RNF20, and PD-1; SIRT1, RNF20, and CD70; SIRT1, RNF20, and CD58; SIRT1, RNF20, PD-1, CD70, CD58, and B2M; SIRT1, RNF20, PD-1, CD70, and B2M; SIRT1, RNF20, PD-1, CD58, and B2M; SIRT1, RNF20, CD70, CD58, and B2M; SIRT1, RNF20, PD-1, and B2M; SIRT1, RNF20, CD70, and B2M; and SIRT1, RNF20, CD58, and B2M.

16. A pharmaceutical composition comprising a functionally enhanced and/or lineage stabilized regulatory T (T_{REG}) cell of claim 14.

17. The pharmaceutical composition of claim 17, wherein the T_{REG} cell overexpresses an inhibitory receptor selected from the group consisting of Human Leukocyte Antigen-E (HLA-E), Human Leukocyte Antigen-G (HLA-G), Programmed Death Ligand 1 (PD-L1), and Cluster of Differentiation 47 (CD47).

18. A pharmaceutical composition comprising one or more guide RNAs (gRNA) and a polynucleotide encoding a base editor comprising a polynucleotide programmable DNA binding polypeptide (napDNAbp) domain and a deaminase domain, wherein each gRNA comprises a nucleic acid sequence that is complementary to a nucleic acid molecule, wherein each nucleic acid molecule encodes a polypeptide and/or comprises a regulatory element associated with expression of the polypeptide, wherein a first polypeptide is selected from the group consisting of bone morphogenetic protein/retinoic acid-inducible neural-specific protein 1 (BRINP1), C terminus of HSC70-interacting protein (CHIP), c-JUN kinase 1 (JNK1), protein kinase C theta (PRKCQ), ring finger protein 20 (RNF20), and sirtuin 1 (SIRT1), and wherein a second polypeptide is selected from the group consisting of Cluster of Differentiation 58 (CD58), Cluster of Differentiation 70 (CD70), and programmed cell death 1 (PD-1).

19. A kit comprising the functionally enhanced and/or stabilized T_{REG} cell of claim 13.

20. A method of treating an autoimmune or alloimmune disease in a subject, the method comprising administering to the subject an effective amount of a functionally enhanced and/or stabilized T_{REG} cell of claim 13.

21. A guide RNA (gRNA) or a polynucleotide encoding the guide RNA, wherein the guide RNA comprises a nucleotide sequence with at least 70% sequence identity to a sequence selected from one or more of those listed in Tables 1A-1C or 2A-2C, or truncations thereof, wherein the gRNA targets a base editor comprising a nucleic acid programmable DNA binding protein (napDNAbp) to effect an alteration in a nucleic acid molecule encoding a polypeptide and/or comprising a regulatory element associated with expression thereof, and wherein the polypeptide is selected from the group consisting of bone morphogenetic protein/retinoic acid-inducible neural-specific protein 1 (BRINP1), C terminus of HSC70-interacting protein (CHIP), Cluster of Differentiation 70 (CD70), c-JUN kinase 1 (JNK1), protein kinase C theta (PRKCQ), ring finger protein 20 (RNF20), and sirtuin 1 (SIRT1), thereby producing a functionally enhanced and/or lineage stabilized T_{REG} cell.

22. A method for producing a functionally enhanced and/or lineage stabilized regulatory T (T_{REG}) cell, the method comprising contacting a T_{REG} cell with a base editor, or a polynucleotide encoding the base editor, wherein the base editor comprises a polynucleotide programmable DNA binding polypeptide (napDNAbp), and an adenosine deaminase, and one or more of the following guide RNAs, or one or more polynucleotides encoding the one or more guide RNAs:
a) a guide RNA comprising a nucleotide sequence selected from the group consisting of TSBTx2810, TSBTx2813, and TSBTx2815;
b) a guide RNA comprising a nucleotide sequence selected from the group consisting of TSBTx2834 and TSBTx845;
c) a guide RNA comprising the nucleotide sequence TSBTx025;
d) a guide RNA comprising the nucleotide sequence TSBTx845; and
e) a guide RNA comprising a nucleotide sequence selected from the group consisting of TSBTx2817, TSBTx2818, TSBTx2819, TSBTx2820, TSBTx2821, TSBTx2822, TSBTx2823, TSBTx2824, TSBTx2825, TSBTx2826, TSBTx2827, TSBTx2828, TSBTx2830, and TSBTx2831;
thereby reducing or eliminating expression in the T_{REG} of one or more of the following polypeptides: cluster of differentiation 70 (CD70), cluster of differentiation 58 (CD58), programmed cell death 1 (PD-1), beta-2 microglobulin (B2M), and sirtuin 1 (SIRT1).

23. A cell prepared according to the method of claim 23.

24. A pharmaceutical composition comprising the cell of claim 23.
